(19) United States
(12) Patent Application Publication
(10) Pub. No.: US 2019/0382477 A1
(43) Pub. Date: Dec. 19, 2019

(54) ANTI-PVRIG/ANTI-TIGIT BISPECIFIC ANTIBODIES AND METHODS OF USE

(71) Applicant: Compugen Ltd., Holon (IL)

(72) Inventors: Andrew W. Drake, South San Francisco, CA (US); Sandeep Kumar, South San Francisco, CA (US); Sayantan Mitra, South San Francisco, CA (US); Adam Sallers, South San Francisco, CA (US); Sarah Whelan, South San Francisco, CA (US); Arun Kashyap, South San Francisco, CA (US); Keith Akama, South San Francisco, CA (US); Neha Yevaekar, South San Francisco, CA (US)

(21) Appl. No.: 16/428,856

(22) Filed: May 31, 2019

Related U.S. Application Data
(60) Provisional application No. 62/679,703, filed on Jun. 1, 2018.
(60) Provisional application No. 62/773,586, filed on Nov. 30, 2018.

(51) Int. Cl. C07K 16/28; C07K 16/46

(52) U.S. Cl. CPC C07K 16/28; C07K 16/468; C07K 2317/92; C07K 2317/24; C07K 2317/31; C07K 16/2818

(57) ABSTRACT

Anti-PVRIG, anti-TIGIT, and anti-PVRIG/anti-TIGIT bispecific antibodies are provided, as well as compositions, and methods of using the antibodies for the treatment of cancer.

### CROSS-REFERENCE TO RELATED APPLICATIONS

[0001] This application claims priority to U.S. Provisional Patent Applications Nos. 62/679,703, filed Jun. 1, 2018 and 62/773,586, filed Nov. 30, 2018, all of which are incorporated by reference in their entireties.

[0002] The instant application contains a Sequence Listing which has been submitted electronically in ASCII format and is hereby incorporated by reference in its entirety. The ASCII copy, created on May 29, 2019, is named 114386-5011-WO_SL.txt and is 2,631,244 bytes in size.

### I. BACKGROUND OF THE INVENTION

[0003] Naïve T cells must receive two independent signals from antigen-presenting cells (APC) in order to become productively activated. The first, Signal 1, is antigen-specific and occurs when T cell antigen receptors encounter the appropriate antigen-MHC complex on the APC. The fate of the immune response is determined by a second, antigen-independent signal (Signal 2) which is delivered through a T cell costimulatory molecule that engages its APC-expressed ligand. This second signal could be either stimulatory (positive costimulation) or inhibitory (negative costimulation or coinhibition). In the absence of a costimulatory signal, or in the presence of a coinhibitory signal, T-cell activation is impaired or aborted, which may lead to a state of antigen-specific unresponsiveness (known as T-cell anergy), or may result in T-cell apoptotic death.

[0004] Costimulatory molecule pairs usually consist of ligands expressed on APCs and their cognate receptors expressed on T cells. The prototype ligand/receptor pairs of costimulatory molecules are B7/CD28 and CD40/CD40L. The B7 family consists of structurally related, cell-surface protein ligands, which may provide stimulatory or inhibitory input to an immune response. Members of the B7 family are structurally related, with the extracellular domain containing at least one variable or constant immunoglobulin domain.

[0005] Both positive and negative costimulatory signals play critical roles in the regulation of cell-mediated immune responses, and molecules that mediate these signals have proven to be effective targets for immunomodulation. Based on this knowledge, several therapeutic approaches that involve targeting of costimulatory molecules have been developed, and were shown to be useful for prevention and treatment of cancer by turning on, or preventing the turning off, of immune responses in cancer patients and for prevention and treatment of autoimmune diseases and inflammatory diseases, as well as rejection of allogenic transplantation, each by turning off uncontrolled immune responses, or by induction of “off signal” by negative costimulation (or coinhibition) in subjects with these pathological conditions.

[0006] Manipulation of the signals delivered by B7 ligands has shown potential in the treatment of autoimmunity, inflammatory diseases, and transplant rejection. Therapeutic strategies include blocking of costimulation using monoclonal antibodies to the ligand or to the receptor of a costimulatory pair, or using soluble fusion proteins composed of the costimulatory receptor that may bind and block its appropriate ligand. Another approach is induction of co-inhibition using soluble fusion protein of an inhibitory ligand. These approaches rely, at least partially, on the eventual deletion of auto- or allo-reactive T cells (which are responsible for the pathogenic processes in autoimmune diseases or transplantation, respectively), presumably because in the absence of costimulation (which induces cell survival genes) T cells become highly susceptible to induction of apoptosis. Thus, novel agents that are capable of modulating costimulatory signals, without compromising the immune system's ability to defend against pathogens, are highly advantageous for treatment and prevention of such pathological conditions.

[0007] Costimulatory pathways play an important role in tumor development. Interestingly, tumors have been shown to evade immune destruction by impeding T cell activation through inhibition of co-stimulatory factors in the B7-CD28 and TNF families, as well as by attracting regulatory T cells, which inhibit anti-tumor T cell responses (see Wang (2006), “Immune Suppression by Tumor Specific CD4⁺ Regulatory T cells in Cancer”, Semin. Cancer. Biol. 16:73-79; Greenwald, et al. (2005), “The B7 Family Revisited”, Ann. Rev. Immunol. 23:515-48; Watts (2005), “TNF/TNFR Family Members in Co-stimulation of T Cell Responses”, Ann. Rev. Immunol. 23:23-68; Sadum, et al., (2007) “Immune Signatures of Murine and Human Cancers Reveal Unique Mechanisms of Tumor Escape and New Targets for Cancer Immunotherapy”, Clin. Canc. Res. 13(13): 4016-4025). Such tumor expressed co-stimulatory molecules have become attractive cancer biomarkers and may serve as tumor-associated antigens (TAAs). Furthermore, costimulatory pathways have been identified as immunologic checkpoints that attenuate T cell dependent immune responses, both at the level of initiation and effector function within tumor metastases.

[0008] Over the past decade, agonists and/or antagonists to various costimulatory proteins have been developed for treating autoimmune diseases, graft rejection, allergy and cancer. For example, CTLA4-Ig (Abatacept, Orencia®) is approved for treatment of RA, mutated CTLA4-Ig (Belatacept, Nulojix®) for prevention of acute kidney transplant rejection and by the anti-CTLA4 antibody (Ipilimumab, Yervoy®), recently approved for the treatment of melanoma. Other costimulation regulators have been approved, such as the anti-PD-1 antibodies of Merck (Keytruda®) and BMS (Opdivo®), have been approved for cancer treatments and are in testing for viral infections as well.

[0009] However, while monotherapy with anti-checkpoint inhibitor antibodies have shown promise, a number of studies (Ahmadzadeh et al., Blood 114:1537 (2009), Matsuzaki et al., PNAS 107(17):7875-7880 (2010), Fourcade et al., Cancer Res. 72(4):887-896 (2012) and Gros et al., J. Clinical Invest. 124(5):2246 (2014)) examining tumor-infiltrating lymphocytes (TILs) have shown that TILs commonly express multiple checkpoint receptors. Moreover, it is likely that TILs that express multiple checkpoints are in fact the most tumor-reactive. In contrast, non-tumor reactive T cells in the periphery are more likely to express a single checkpoint. Checkpoint blockade with monospecific full-length antibodies is likely nondiscriminatory with regards to de-repression of tumor-reactive TILs versus autoantigen-reactive single expressing T cells that are assumed to contribute to autoimmune toxicities.

[0010] One target of interest is PVRIG. PVRIG, also called Poliovirus Receptor Related Immunoglobulin Domain Containing Protein, Q6DKI7 or C7orf15, is a transmembrane domain protein of 326 amino acids in length, with a signal peptide (spanning from amino acid 1 to 40), an extracellular domain (spanning from amino acid 41 to 171), a transmembrane domain (spanning from amino acid 172 to 190) and a cytoplasmic domain (spanning from amino acid 191 to 326). PVRIG binds to Poliovirus receptor-related 2 protein (PVLR2, also known as nectin-2, CD112 or herpesvirus entry mediator B, (HVEB) a human plasma membrane glycoprotein), the binding partner of PVRIG.

[0011] Another target of interest is TIGIT. TIGIT is a coinhibitory receptor that is highly expressed on effector & regulatory (Treg) CD4+ T cells, effector CD8+ T cells, and NK cells. TIGIT has been shown to attenuate immune response by (1) direct signaling, (2) inducing ligand signaling, and (3) competition with and disruption of signaling by the costimulatory receptor CD226 (also known as DNAM-1). TIGIT signaling has been the most well-studied in NK cells, where it has been demonstrated that engagement with its cognate ligand, poliovirus receptor (PVR, also known as CD155) directly suppresses NK cell cytotoxicity through its cytoplasmic ITIM domain. Knockout of the TIGIT gene or antibody blockade of the TIGIT/PVR interaction has shown to enhance NK cell killing in vitro, as well as to exacerbate autoimmune diseases in vivo. In addition to its direct effects on T- and NK cells, TIGIT can induce PVR-mediated signaling in dendritic or tumor cells, leading to the increase in production of anti-inflammatory cytokines such as IL10. In T-cells TIGIT can also inhibit lymphocyte responses by disrupting homodimerization of the costimulatory receptor CD226, and by competing with it for binding to PVR.

[0012] TIGIT is highly expressed on lymphocytes, including Tumor Infiltrating Lymphocytes (TILs) and Tregs, that infiltrate different types of tumors. PVR is also broadly expressed in tumors, suggesting that the TIGIT-PVR signaling axis may be a dominant immune escape mechanism for cancer. Notably, TIGIT expression is tightly correlated with the expression of another important coinhibitory receptor, PD1. TIGIT and PD1 are co-expressed on the TILs of numerous human and murine tumors. Unlike TIGIT and CTLA4, PD1 inhibition of T cell responses does not involve competition for ligand binding with a costimulatory receptor.

[0013] Accordingly, PVRIG/TIGIT bispecific antibodies, capable of targeting both pathways, are an attractive target for single antibody therapy. Such antibodies will allow for targeting of multiple checkpoint receptors and provide therapeutic importance in the treatment of cancer. Also provided are anti-PVRIG and anti-TIGIT antibodies for use as described herein.

### II. BRIEF SUMMARY OF THE INVENTION

[0014] Accordingly, the present invention provides an anti-PVRIG/anti-TIGIT bispecific antibody that monovalently binds a human PVRIG and monovalently binds TIGIT for use in activating T cells for the treatment of cancer.

[0015] In some embodiments, the present invention provides an anti-PVRIG/anti-TIGIT bispecific antibody that monovalently binds a human PVRIG and monovalently binds TIGIT for use in activating T cells and/or NK cells for the treatment of cancer.

[0016] In some embodiments, the anti-PVRIG/anti-TIGIT bispecific antibody comprises:
[0017] a) a first antigen binding portion comprising:
   [0018] i. a first heavy chain variable domain comprising a vhCDR1, vhCDR2, and vhCDR3 from an anti-PVRIG antibody; and
   [0019] ii. a first light chain variable domain comprising a vlCDR1, vlCDR2, and vlCDR3 from an anti-PVRIG antibody;
      [0020] wherein the anti-PVRIG antibody is selected from the group consisting of CHA.7.518.4, CHA.7.518.1, CHA.7.518, CHA.7.524 CHA.7.530, CHA.7.538_1, CHA.7.538_2, CHA.7.502, CHA.7.503, CHA.7.506, CHA.7.508, CHA.7.510, CHA.7.512, CHA.7.514, CHA.7.516, CHA.7.518, CHA.7.520.1, CHA.7.520.2, CHA.7.522, CHA.7.524, CHA.7.526, CHA.7.527, CHA.7.528, CHA.7.530, CHA.7.534, CHA.7.535, CHA.7.537, CHA.7.538.1, CHA.7.538.2, CHA.7.543, CHA.7.544, CHA.7.545, CHA.7.546, CHA.7.547, CHA.7.548, CHA.7.549,CHA.7.550, CHA7.538.1.2, CPA.7.021, CPA.7.001, CPA.7.003, CPA.7.004, CPA.7.006, CPA.7.008, CPA.7.009, CPA.7.010, CPA.7.011, CPA.7.012, CPA.7.013, CPA.7.014, CPA.7.015, CPA.7.017, CPA.7.018, CPA.7.019,CPA.7.022, CPA.7.023, CPA.7.024, CPA.7.033, CPA.7.034, CPA.7.036, CPA.7.040, CPA.7.046, CPA.7.047, CPA.7.049, CPA.7.050, and CHA.7.518; and
[0021] a) a second antigen binding portion comprising an anti-TIGIT antigen binding domain.

[0022] In some embodiments, the anti-PVRIG/anti-TIGIT bispecific antibody comprises:
[0023] a) a first antigen binding portion comprising an anti-PVRIG antigen binding domain; and
[0024] b) a second antigen binding portion comprising:
   [0025] i. a second heavy chain variable domain comprising a vhCDR1, vhCDR2, and vhCDR3 from an anti-TIGIT antibody; and
   [0026] ii. a second light chain variable domain comprising a vlCDR1, vlCDR2, and vlCDR3 from an anti-TIGIT antibody;
      [0027] wherein the anti-TIGIT antibody is selected from the group consisting of CPA.9.086, CHA.9.547.18, CPA.9.018, CPA.9.027, CPA.9.049, CPA.9.057, CPA.9.059, CPA.9.083, CPA.9.089, CPA.9.093, CPA.9.101, CPA.9.103, CHA.9.536.1, CHA.9.536.3, CHA.9.536.4, CHA.9.536.5, CHA.9.536.6, CHA.9.536.7, CHA.9.536.8, CHA.9.560.1, CHA.9.560.3, CHA.9.560.4, CHA.9.560.5, CHA.9.560.6, CHA.9.560.7, CHA.9.560.8, CHA.9.546.1, CHA.9.547.1, CHA.9.547.2, CHA.9.547.3, CHA.9.547.4, CHA.9.547.6, CHA.9.547.7, CHA.9.547.8, CHA.9.547.9, CHA.9.547.13, CHA.9.541.1, CHA.9.541.3, CHA.9.541.4, CHA.9.541.5, CHA.9.541.6, CHA.9.541.7, and CHA.9.541.8.

[0028] In some embodiments, the anti-PVRIG/anti-TIGIT bispecific antibody comprises:
[0029] a) a first antigen binding portion comprising:
   [0030] i. a first heavy chain variable domain comprising a vhCDR1, vhCDR2, and vhCDR3 from an anti-PVRIG antibody; and
   [0031] ii. a first light chain variable domain comprising a vlCDR1, vlCDR2, and vlCDR3 from an anti-PVRIG antibody
      [0032] wherein the anti-PVRIG antibody is selected from the group consisting of CHA.7.518.4, CHA.7.518.1, humanized CHA.7.518, humanized CHA.7.524, humanized CHA.7.530, humanized CHA.7.538_1, humanized CHA.7.538_2, CHA.7.502, CHA.7.503, CHA.7.506, CHA.7.508, CHA.7.510, CHA.7.512, CHA.7.514, CHA.7.516, CHA.7.518, CHA.7.520.1, CHA.7.520.2, CHA.7.522, CHA.7.524, CHA.7.526, CHA.7.527, CHA.7.528, CHA.7.530, CHA.7.534, CHA.7.535, CHA.7.537, CHA.7.538.1, CHA.7.538.2, CHA.7.543, CHA.7.544, CHA.7.545, CHA.7.546, CHA.7.547, CHA.7.548, CHA.7.549,CHA.7.550, CHA7.538.1.2, CPA.7.021, CPA.7.001, CPA.7.003, CPA.7.004, CPA.7.006, CPA.7.008, CPA.7.009, CPA.7.010, CPA.7.011, CPA.7.012, CPA.7.013, CPA.7.014, CPA.7.015, CPA.7.017, CPA.7.018, CPA.7.019,CPA.7.022, CPA.7.023, CPA.7.024, CPA.7.033, CPA.7.034, CPA.7.036, CPA.7.040, CPA.7.046, CPA.7.047, CPA.7.049, and CPA.7.050CHA.7.518; and
[0033] b) a second antigen binding portion comprising:
   [0034] i. a second heavy chain variable domain comprising a vhCDR1, vhCDR2, and vhCDR3 from an anti-TIGIT antibody; and
   [0035] ii. a second light chain variable domain comprising a vlCDR1, vlCDR2, and vlCDR3 from an anti-TIGIT antibody;
      [0036] wherein the anti-TIGIT antibody is selected from the group consisting of CPA.9.086, CHA.9.547.18, CPA.9.018, CPA.9.027, CPA.9.049, CPA.9.057, CPA.9.059, CPA.9.083, CPA.9.086, CPA.9.089, CPA.9.093, CPA.9.101, CPA.9.103, CHA.9.536.1, CHA.9.536.3, CHA.9.536.4, CHA.9.536.5, CHA.9.536.6, CHA.9.536.7, CHA.9.536.8, CHA.9.560.1, CHA.9.560.3, CHA.9.560.4, CHA.9.560.5, CHA.9.560.6, CHA.9.560.7, CHA.9.560.8, CHA.9.546.1, CHA.9.547.1, CHA.9.547.2, CHA.9.547.3, CHA.9.547.4, CHA.9.547.6, CHA.9.547.7, CHA.9.547.8, CHA.9.547.9, CHA.9.547.13, CHA.9.541.1, CHA.9.541.3, CHA.9.541.4, CHA.9.541.5, CHA.9.541.6, CHA.9.541.7, and CHA.9.541.8.

[0037] In some embodiments, the first antigen binding portion comprises:
[0038] i. a first heavy chain comprising VH-CH1-hinge-CH2-CH3; and
[0039] ii. a first light chain comprising VL-CL, wherein the CL is the constant domain of either a kappa or lambda antibody.

[0040] In some embodiments, the first heavy chain CH3 comprises the amino acid substitutions S354C, E356D, M358L, and T366W.

[0041] In some embodiments, the CL is kappa.

[0042] In some embodiments, the second antigen binding portion comprises:
[0043] i. a second heavy chain comprising HC-CL-hinge-CH2-CH3, wherein the CL is either kappa or lambda; and
[0044] ii. a second light chain comprising VL-CH1.

[0045] In some embodiments, the second heavy chain CH3 comprises the amino acid substitutions Y349C, E356D, M358L, T366S, L368A, and Y407V.

[0046] In some embodiments, the CL is lambda.

[0047] In some embodiments, the CL is kappa.

[0048] In some embodiments, the anti-PVRIG/anti-TIGIT bispecific antibody comprises:
[0049] a) a first antigen binding portion comprising an anti-PVRIG antigen binding domain; and
[0050] b) a second anti-TIGIT antigen binding portion comprising:

i.
a second heavy chain variable region
comprising CPA.9.086 VH
(EVQLVETGGGLIQPGRSLRLSCAASGFTFSSYAMHWVRQAPG
KGLEWVAVISYAGEVKYYADSVKGRFTISRDNSKNTLYLQMN
SLRAEDTAVYYCARDPLPLHYYGMDVWGQGTTVTVSS; SEQ
ID NO: 1634);
and
ii.
a second light chain variable region
comprising CPA.9.086 VL
(QSALTQPRSASGNPGQRVTISCSGSSSNMGRRPVNWYQQIPGT
APKLLIYSQNQRPSGVPDRFSGSQSGTSASLTISGLQSEDEAEYF
CAVWDDIGRVLQLGGGTQLAVL; SEQ ID NO: 1639).

[0051] In some embodiments, the anti-PVRIG/anti-TIGIT bispecific antibody comprises:
[0052] c) a first antigen binding portion comprising an anti-PVRIG antigen binding domain; and
[0053] d) a second anti-TIGIT antigen binding portion comprising:

i.
a second heavy chain variable region
comprising CPA.9.547.18 VH
(EVQLVESGGGLVQPGGSLRLSCAASGFTFSSYIMSWVRQAPGK
GLEWVATISGGSKGQYYADSVKGRFTISRDNSKNTLYLQMNSL
RAEDTAVYYCAKWLLSYYAMDYWGQGTLVTVSS; SEQ ID
NO: 1664);
and
ii.
a second light chain variable region
comprising CPA.9.547.18 VL
(DIQMTQSPSSLSASVGDRITITCRASQSMAIWLSWYQQKPGKA
PKLLIYKASKSHTGVPSRFSGSGSGTDFTLTISSLQPEDFATYYC
QQGQSYPYTFGQGTKLEIK; SEQ ID NO: 1668).

[0054] In some embodiments, the anti-PVRIG/anti-TIGIT bispecific antibody comprises:
[0055] a) a first antigen binding portion comprising an anti-PVRIG binding doming comprising:

i.
a first heavy chain variable region
comprising CHA.7.518.1 VH
(QVQLVQSGAEVKKPGASVKVSCKASGYTFTDYNINWVRQAP
GQGLEWMGYIYPYIGGSGYAQKFQGRVTMTRDTSTSTVYMEL
SSLRSEDTAVYYCAREDKTARNAMDYWGQGTLVTVSS; SEQ
ID NO: 1539);
and
ii.
a first light chain comprising CHA.7.518.1 VL
(DIQMTQSPSSLSASVGDRVTITCRVSENIYSNLAWYQQKPGKA
PKLLIYEATNLAEGVPSRFSGSGSGTDFTLTISSLQPEDFATYYC
QHFWGTPYTFGQGTKLEIK; SEQ ID NO: 1544);

and
[0056] b) a second antigen binding portion comprising an anti-TIGIT antigen binding domain.

[0057] In some embodiments, the anti-PVRIG/anti-TIGIT bispecific antibody comprises:
[0058] a) a first antigen binding portion comprising an anti-PVRIG binding doming comprising:

i.
a first heavy chain variable region
comprising CHA.7.518.4 VH
(QVQLVQSGAEVKKPGASVKVSCKASGYTFTDYNINWVRQAP
GQGLEWMGYIYPYIGGSGYAQKFQGRVTMTRDTSTSTVYMEL
SSLRSEDTAVYYCAREDKTARNAMDYWGQGTLVTVSS; SEQ
ID NO: 3179);
and
ii.
a first light chain comprising CHA.7.518.4 VL
(DIQMTQSPSSLSASVGDRVTITCRVSENIYDVLAWYQQKPGKA
PKLLIYEATNLAEGVPSRFSGSGSGTDFTLTISSLQPEDFATYYC
QHFWGTPYTFGQGTKLEIK; SEQ ID NO: 3180);

and
[0059] b) a second antigen binding portion comprising an anti-TIGIT antigen binding domain.

[0060] In some embodiments, the anti-PVRIG/anti-TIGIT bispecific antibody comprises:
[0061] a) a first antigen binding portion comprising an anti-PVRIG binding doming comprising:

i.
a first heavy chain variable region
comprising CHA.7.518.1 VH
(QVQLVQSGAEVKKPGASVKVSCKASGYTFTDYNINWVRQAP
GQGLEWMGYIYPYIGGSGYAQKFQGRVTMTRDTSTSTVYMEL
SSLRSEDTAVYYCAREDKTARNAMDYWGQGTLVTVSS; SEQ
ID NO: 1539);
and
ii.
a first light chain variable region
comprising CHA.7.518.1
(DIQMTQSPSSLSASVGDRVTITCRVSENIYSNLAWYQQKPGKA
PKLLIYEATNLAEGVPSRFSGSGSGTDFTLTISSLQPEDFATYYC
QHFWGTPYTFGQGTKLEIK; SEQ ID NO: 1544):

and
[0062] b) a second antigen binding portion comprising an anti-TIGIT binding doming comprising

i.
a first heavy chain variable region
comprising CPA.9.086 VH
(EVQLVETGGGLIQPGRSLRLSCAASGFTFSSYAMHWVRQAPG
KGLEWVAVISYAGEVKYYADSVKGRFTISRDNSKNTLYLQMN
SLRAEDTAVYYCARDPLPLHYYGMDVWGQGTTVTVSS; SEQ
ID NO: 1634);
and
ii.
a first light chain variable region
comprising CPA.9.086 VL
(QSALTQPRSASGNPGQRVTISCSGSSSNMGRRPVNWYQQIPGT
APKLLIYSQNQRPSGVPDRFSGSQSGTSASLTISGLQSEDEAEYF
CAVWDDIGRVLQLGGGTQLAVL; SEQ ID NO: 1639).

[0063] In some embodiments, the anti-PVRIG/anti-TIGIT bispecific antibody comprises:
[0064] a) a first antigen binding portion comprising an anti-PVRIG binding doming comprising:

i.
a first heavy chain variable region
comprising CHA.7.518.4 VH
(QVQLVQSGAEVKKPGASVKVSCKASGYTFTDYNINWVRQAP
GQGLEWMGYIYPYIGGSGYAQKFQGRVTMTRDTSTSTVYMEL
SSLRSEDTAVYYCAREDKTARNAMDYWGQGTLVTVSS; SEQ
ID NO: 3179);
and
ii.
a first light chain comprising CHA.7.518.4 VL
(DIQMTQSPSSLSASVGDRVTITCRVSENIYDVLAWYQQKPGKA
PKLLIYEATNLAEGVPSRFSGSGSGTDFTLTISSLQPEDFATYYC
QHFWGTPYTFGQGTKLEIK; SEQ ID NO: 3180)

and
[0065] b) a second antigen binding portion comprising an anti-TIGIT binding doming comprising:

i.
a first heavy chain variable region
comprising CPA.9.086 VH
(EVQLVETGGGLIQPGRSLRLSCAASGFTFSSYAMHWVRQAPG
KGLEWVAVISYAGEVKYYADSVKGRFTISRDNSKNTLYLQMN
SLRAEDTAVYYCARDPLPLHYYGMDVWGQGTTVTVSS; SEQ
ID NO: 1634);
and
ii.
a first light chain variable region
comprising CPA.9.086 VL
(QSALTQPRSASGNPGQRVTISCSGSSSNMGRRPVNWYQQIPGT
APKLLIYSQNQRPSGVPDRFSGSQSGTSASLTISGLQSEDEAEYF
CAVWDDIGRVLQLGGGTQLAVL; SEQ ID NO: 1639).

[0066] In some embodiments, the anti-PVRIG/anti-TIGIT bispecific antibody comprises:
[0067] a) a first antigen binding portion comprising an anti-PVRIG binding doming comprising:

i. a first heavy chain variable region comprising
CHA.7.518.1
(QVQLVQSGAEVKKPGASVKVSCKASGYTFTDYNINWVRQAP
GQGLEWMGYIYPYIGGSGYAQKFQGRVTMTRDTSTSTVYMEL
SSLRSEDTAVYYCAREDKTARNAMDYWGQGTLVTVSS; SEQ
ID NO: 1539);
and
ii. a first light chain variable region comprising
CHA.7.518.1 VL
(DIQMTQSPSSLSASVGDRVTITCRVSENIYSNLAWYQQKPGKA
PKLLIYEATNLAEGVPSRFSGSGSGTDFTLTISSLQPEDFATYYC
QHFWGTPYTFGQGTKLEIK; SEQ ID NO: 1544);

and
[0068] b) a second antigen binding portion comprising an anti-TIGIT binding doming comprising:

i. a first heavy chain variable region comprising
CHA.9.547.18 HC
(EVQLVESGGGLVQPGGSLRLSCAASGFTFSSYIMSWVRQAPGK
GLEWVATISGGSKGQYYADSVKGRFTISRDNSKNTLYLQMNSL
RAEDTAVYYCAKWLLSYYAMDYWGQGTLVTVSS; SEQ ID
NO: 1664);
and
ii. a first light chain variable region comprising
CHA.9.547.18 VL
(DIQMTQSPSSLSASVGDRITITCRASQSMAIWLSWYQQKPGKA
PKLLIYKASKSHTGVPSRFSGSGSGTDFTLTISSLQPEDFATYYC
QQGQSYPYTFGQGTKLEIK; SEQ ID NO: 1668).

[0069] In some embodiments, the anti-PVRIG/anti-TIGIT bispecific antibody comprises:
[0070] a) a first antigen binding portion comprising an anti-PVRIG binding doming comprising:

i. a first heavy chain variable region comprising
CHA.7.518.4 VH
(QVQLVQSGAEVKKPGASVKVSCKASGYTFTDYNINWVRQAP
GQGLEWMGYIYPYIGGSGYAQKFQGRVTMTRDTSTSTVYMEL
SSLRSEDTAVYYCAREDKTARNAMDYWGQGTLVTVSS; SEQ
ID NO: 3179);
and
ii. a first light chain comprising CHA.7.518.4 VL
(DIQMTQSPSSLSASVGDRVTITCRVSENIYDVLAWYQQKPGKA
PKLLIYEATNLAEGVPSRFSGSGSGTDFTLTISSLQPEDFATYYC
QHFWGTPYTFGQGTKLEIK; SEQ ID NO: 3180);

and
[0071] b) a second antigen binding portion comprising an anti-TIGIT binding doming comprising:

i. a first heavy chain variable region comprising
CHA.9.547.18 HC
(EVQLVESGGGLVQPGGSLRLSCAASGFTFSSYIMSWVRQAPGK
GLEWVATISGGSKGQYYADSVKGRFTISRDNSKNTLYLQMNSL
RAEDTAVYYCAKWLLSYYAMDYWGQGTLVTVSS (SEQ ID
NO: 1664);
and
ii. a first light chain variable region comprising
CHA.9.547.18 VL
(DIQMTQSPSSLSASVGDRITITCRASQSMAIWLSWYQQKPGKA
PKLLIYKASKSHTGVPSRFSGSGSGTDFTLTISSLQPEDFATYYC
QQGQSYPYTFGQGTKLEIK; SEQ ID NO: 1668).

[0072] In some embodiments, the anti-PVRIG/anti-TIGIT bispecific antibody is a humanized antibody.

[0073] In some embodiments, the present invention provides a composition comprising an anti-PVRIG/anti-TIGIT bispecific antibody as described herein.

[0074] A nucleic acid composition comprising:
[0075] a) a first nucleic acid encoding a first heavy chain or heavy chain variable domain as described herein;
[0076] b) a second nucleic acid encoding a first light chain or light chain variable domain as described herein;
[0077] c) a third nucleic acid encoding a second heavy chain or heavy chain variable domain as described herein; and
[0078] d) a fourth nucleic acid encoding a second light chain or light chain variable domain as described herein.

[0079] In some embodiments, the present invention provides an expression vector composition comprising:
[0080] a) a first expression vector comprising the first nucleic acid as described herein;
[0081] b) a second expression vector comprising the second nucleic acid as described herein;
[0082] c) a third expression vector comprising the third nucleic acid as described herein; and
[0083] d) a fourth expression vector comprising the fourth nucleic acid as described herein.

[0084] In some embodiments, the present invention provides an expression vector composition comprising:
[0085] a) a first expression vector comprising the first and second nucleic acids as described herein; and
[0086] b) a second expression vector comprising the third and fourth nucleic acids as described herein.

[0087] In some embodiments, the present invention provides a host cell comprising the expression vector composition as described herein.

[0088] In some embodiments, the present invention provides a method of making an anti-PVRIG/anti-TIGIT bispecific antibody comprising:
[0089] a) culturing the host cell as described herein under conditions wherein the antibody is expressed; and
[0090] b) recovering the antibody.

[0091] In some embodiments, the present invention provides a method of activating T cells of a patient comprising administering the anti-PVRIG/anti-TIGIT bispecific antibody as described herein to the patient, wherein a subset of the T cells of the patient are activated.

[0092] In some embodiments, the present invention provides a method of activating cytotoxic T cells (CTLs) of a patient comprising administering the anti-PVRIG/anti-TIGIT bispecific antibody as described herein to the patient, wherein a subset of the CTLs of the patient are activated.

[0093] In some embodiments, the present invention provides a method of activating NK cells of a patient comprising administering the anti-PVRIG/anti-TIGIT bispecific antibody as described herein to the patient, wherein a subset of the NK cells of the patient are activated.

[0094] In some embodiments, the present invention provides a method of activating γδ T cells of a patient comprising administering the anti-PVRIG/anti-TIGIT bispecific antibody as described herein to the patient, wherein a subset of the γδ T cells of the patient are activated.

[0095] In some embodiments, the present invention provides a method of activating Th1 cells of a patient comprising administering the anti-PVRIG/anti-TIGIT bispecific antibody as described herein to the patient, wherein a subset of the Th1 cells of the patient are activated.

[0096] In some embodiments, the present invention provides a method of decreasing or eliminating cell number and/or activity of at least one of regulatory T cells (Tregs) in a patient comprising administering the anti-PVRIG/anti-TIGIT bispecific antibody as described herein to the patient.

[0097] In some embodiments, the present invention provides a method of increasing interferon-γ production and/or pro-inflammatory cytokine secretion in a patient comprising administering the anti-PVRIG/anti-TIGIT bispecific antibody as described herein to the patient.

[0098] In some embodiments, the present invention provides a method of treating cancer in a patient comprising administering the anti-PVRIG/anti-TIGIT antibody as described herein to the patient.

[0099] In some embodiments, the cancer is selected from the group consisting of prostate cancer, liver cancer (HCC), colorectal cancer, ovarian cancer, endometrial cancer, breast cancer, triple negative breast cancer, pancreatic cancer, stomach (gastric) cancer, cervical cancer, head and neck cancer, thyroid cancer, testis cancer, urothelial cancer, lung cancer (small cell lung, non-small cell lung), melanoma, non melanoma skin cancer (squamous and basal cell carcinoma), glioma, renal cancer (RCC), lymphoma (NHL or HL), Acute myeloid leukemia (AML), T cell Acute Lymphoblastic Leukemia (T-ALL), Diffuse Large B cell lymphoma, testicular germ cell tumors, mesothelioma, esophageal cancer, Merkel Cells cancer, MSI-high cancer, KRAS mutant tumors, adult T-cell leukemia/lymphoma, myeloma, and Myelodysplastic syndromes (MDS).

[0100] In some embodiments, the cancer is selected from the group consisting of triple negative breast cancer, stomach (gastric) cancer, lung cancer (small cell lung, non-small cell lung), Merkel Cells cancer, MSI-high cancer, KRAS mutant tumors, adult T-cell leukemia/lymphoma, myeloma, and Myelodysplastic syndromes (MDS).

[0101] In some embodiments, the present invention provides an anti-PVRIG/anti-TIGIT bispecific antibody comprising:
[0102] a) a first antigen binding portion comprising an anti-PVRIG antigen binding portion comprising:
   [0103] i. a first heavy chain variable domain comprising a vhCDR1, vhCDR2, and vhCDR3 from an anti-PVRIG antibody; and
   [0104] ii. a first light chain variable domain comprising a vlCDR1, vlCDR2, and vlCDR3 from an anti-PVRIG antibody;
      [0105] wherein the anti-PVRIG antigen binding portion is selected from the group consisting of CPA.7.021, CPA.7.001, CPA.7.003, CPA.7.004, CPA.7.006, CPA.7.008, CPA.7.009, CPA.7.010, CPA.7.011, CPA.7.012, CPA.7.013, CPA.7.014, CPA.7.015, CPA.7.017, CPA.7.018, CPA.7.019, CPA.7.022, CPA.7.023, CPA.7.024, CPA.7.033, CPA.7.034, CPA.7.036, CPA.7.040, CPA.7.046, CPA.7.047, CPA.7.049, CPA.7.050, CHA.7.502, CHA.7.503, CHA.7.506, CHA.7.508, CHA.7.510, CHA.7.512, CHA.7.514, CHA.7.516, CHA.7.518, CHA.7.520.1, CHA.7.520.2, CHA.7.522, CHA.7.524, CHA.7.526, CHA.7.527, CHA.7.528, CHA.7.530, CHA.7.534, CHA.7.535, CHA.7.537, CHA.7.538.1, CHA.7.538.2, CHA.7.543, CHA.7.544, CHA.7.545, CHA.7.546, CHA.7.547, CHA.7.548, CHA.7.549, CHA.7.550, CHA.7.518.1; CHA7.538.1.2 and CHA.7.518.4; and
[0106] b) a second antigen binding portion comprising an anti-TIGIT antigen binding domain, wherein the anti-TIGIT antigen binding domain is from an antibody as provided in FIGS. 24A-24EE and 41A-41T, and in particular FIG. 24A-24EE.

[0107] In some embodiments, the present invention provides an anti-PVRIG/anti-TIGIT bispecific antibody comprising:
[0108] a) a first antigen binding portion comprising an anti-PVRIG antigen binding domain wherein the anti-PVRIG antigen binding domain is from an antibody as provided in FIG. 35A-35D; and
[0109] b) a second antigen binding portion comprising an anti-TIGIT antigen binding domain comprising:
   [0110] i. a second heavy chain variable domain comprising a vhCDR1, vhCDR2, and vhCDR3 from an anti-TIGIT antibody; and
   [0111] ii. a second light chain variable domain comprising a vlCDR1, vlCDR2, and vlCDR3 from an anti-TIGIT antibody;
      [0112] wherein the anti-TIGIT antigen binding domain is selected from the group consisting of CPA.9.018, CPA.9.027, CPA.9.049, CPA.9.057, CPA.9.059, CPA.9.083, CPA.9.086, CPA.9.089, CPA.9.093, CPA.9.101, CPA.9.103, CHA.9.536.1, CHA.9.536.3, CHA.9.536.4, CHA.9.536.5, CHA.9.536.6, CHA.9.536.7, CHA.9.536.8, CHA.9.560.1, CHA.9.560.3, CHA.9.560.4, CHA.9.560.5, CHA.9.560.6, CHA.9.560.7, CHA.9.560.8, CHA.9.546.1, CHA.9.547.1, CHA.9.547.2, CHA.9.547.3, CHA.9.547.4, CHA.9.547.6, CHA.9.547.7, CHA.9.547.8, CHA.9.547.9, CHA.9.547.13, CHA.9.541.1, CHA.9.541.3, CHA.9.541.4, CHA.9.541.5, CHA.9.541.6, CHA.9.541.7, CHA.9.541.8, and CHA.9.547.18.

[0113] In some embodiments, the present invention provides an anti-PVRIG antibody comprising:

i) a heavy chain or heavy chain variable domain
comprising the vhCDR1, vhCDR2, and vhCDR3
from the following sequence:

(SEQ ID NO: 3179)

QVQLVQSGAEVKKPGASVKVSCKASGYTFTDYNINWVRQAPGQGLEWMG
YIYPYIGGSGYAQKFQGRVTMTRDTSTSTVYMELSSLRSEDTAVYYCAR
EDKTARNAMDYWGQGTLVTVSS,
and
ii) a light chain or light chain variable domain
comprisingthe vlCDR1, vlCDR2, vlCDR3 from
the following sequence:

(SEQ ID NO: 3180)

DIQMTQSPSSLSASVGDRVTITCRVSENIYDVLAWYQQKPGKAPKLLIY
EATNLAEGVPSRFSGSGSGTDFTLTISSLQPEDFATYYCQHFWGTPYT
FGQGTKLEIK.

[0114] In some embodiments, the present invention provides an anti-TIGIT antibody comprising:

i) a heavy chain or heavy chain variable domain
comprising the vhCDR1, vhCDR2, and vhCDR3
from the following sequence:

(SEQ ID NO: 1664)

EVQLVESGGGLVQPGGSLRLSCAASGFTFSSYIMSWVRQAPGKGLEW
VATISGGSKGQYYADSVKGRFTISRDNSKNTLYLQMNSLRAEDTAVYYC
AKWLLSYYAMDYWGQGTLVTVSS,
and
ii) a light chain or light chain variable domain
comprising the vlCDR1, vlCDR2, and vlCDR3
from the following sequence:

(SEQ ID NO: 1668)

DIQMTQSPSSLSASVGDRITITCRASQSMAIWLSWYQQKPGKAPKLLIY
KASKSHTGVPSRFSGSGSGTDFTLTISSLQPEDFATYYCQQGQSYPYTF
GQGTKLEIK.

[0115] In some embodiments, the anti-PVRIG antibody comprises:

a) a heavy chain comprising CHA.7.518.4 VH
(QVQLVQSGAEVKKPGASVKVSCKASGYTFTDYNINWVRQAPGQGLE
WMGYIYPYIGGSGYAQKFQGRVTMTRDTSTSTVYMELSSLRSEDTAV
YYCAREDKTARNAMDYWGQGTLVTVSSASTKGPSVFPLAPCSRSTSE
STAALGCLVKDYFPEPVTVSWNSGALTSGVHTFPAVLQSSGLYSLSSV
VTVPSSSLGTKTYTCNVDHKPSNTKVDKRVESKYGPPCPPCPAPEFLG
GPSVFLFPPKPKDTLMISRTPEVTCVVVDVSQEDPEVQFNWYVDGVEV
HNAKTKPREEQFNSTYRVVSVLTVLHQDWLNGKEYKCKVSNKGLPSS
IEKTISKAKGQPREPQVYTLPPCQDELTKNQVSLWCLVKGFYPSDIAV
EWESNGQPENNYKTTPPVLDSDGSFFLYSRLTVDKSRWQEGNVFSCS
VMHEALHNHYTQKSLSLSPGK; SEQ ID NO: 3175);
and
b) a light chain comprising CHA.7.518.4 VL
(DIQMTQSPSSLSASVGDRVTITCRVSENIYDVLAWYQQKPGKAPKLLI
YEATNLAEGVPSRFSGSGSGTDFTLTISSLQPEDFATYYCQHFWGTPYT
FGQGTKLEIKRTVAAPSVFIFPPSDEQLKSGTASVVCLLNNFYPREAKV
QWKVDNALQSGNSQESVTEQDSKDSTYSLSSTLTLSKADYEKHKVYA
CEVTHQGLSSPVTKSFNRGEC; SEQ ID NO: 3362).

[0116] In some embodiments, the present invention provides a composition comprising an anti-PVRIG antibody according as described herein.

[0117] In some embodiments, the present invention provides a nucleic acid composition comprising:
[0118] i) a first nucleic acid encoding a heavy chain or heavy chain variable domain as described herein; and
[0119] ii) a second nucleic acid encoding a light chain or light chain variable domain as described herein.

[0120] In some embodiments, the present invention provides a composition comprising an anti-TIGIT antibody as described herein.

[0121] In some embodiments, the present invention provides a nucleic acid composition comprising:
[0122] i) a first nucleic acid encoding a heavy chain or heavy chain variable domain as described herein; and
[0123] ii) a second nucleic acid encoding a light chain or light chain variable domain as described herein.

[0124] In some embodiments, the present invention provides an expression vector composition comprising:
[0125] i) a first expression vector comprising the first nucleic acid as described herein; and
[0126] ii) a second expression vector comprising the second nucleic acid as described herein.

[0127] An expression vector comprising:
[0128] i) the first nucleic acid as described herein; and
[0129] ii) the second nucleic acid as described herein.

[0130] In some embodiments, the present invention provides an expression vector composition comprising:
[0131] i) a first expression vector comprising the first nucleic acid as described herein; and
[0132] ii) a second expression vector comprising the second nucleic acid as described herein.

[0133] In some embodiments, the present invention provides an expression vector comprising:
[0134] i) the first nucleic acid as described herein; and
[0135] ii) the second nucleic acid as described herein.

[0136] In some embodiments, the present invention provides a host cell comprising the expression vector or vector composition as described herein.

[0137] In some embodiments, the present invention provides a method of making an anti-PVRIG or anti-TIGIT antibody comprising:
[0138] i) culturing the host cell as described herein under conditions wherein the antibody is expressed; and
[0139] ii) recovering the antibody.

[0140] In some embodiments, the present invention provides a method of activating T cells of a patient comprising administering the anti-PVRIG or anti-TIGIT antibody as described herein to the patient, wherein a subset of the T cells of the patient are activated.

[0141] In some embodiments, the present invention provides a method of activating cytotoxic T cells (CTLs) of a patient comprising administering the anti-PVRIG or anti-TIGIT antibody as described herein to the patient, wherein a subset of the CTLs of the patient are activated.

[0142] In some embodiments, the present invention provides a method of activating NK cells of a patient comprising administering the anti-PVRIG or anti-TIGIT antibody as described herein to the patient, wherein a subset of the NK cells of the patient are activated.

[0143] In some embodiments, the present invention provides a method of activating γδ T cells of a patient comprising administering the anti-PVRIG or anti-TIGIT antibody as described herein to the patient, wherein a subset of the γδ T cells of the patient are activated.

[0144] In some embodiments, the present invention provides a method of activating Th1 cells of a patient comprising administering the anti-PVRIG or anti-TIGIT antibody as described herein to the patient, wherein a subset of the Th1 cells of the patient are activated.

[0145] In some embodiments, the present invention provides a method of decreasing or eliminating cell number and/or activity of at least one of regulatory T cells (Tregs) in a patient comprising administering the anti-PVRIG or anti-TIGIT antibody as described herein to the patient.

[0146] In some embodiments, the present invention provides a method of increasing interferon-γ production and/or pro-inflammatory cytokine secretion in a patient comprising administering the anti-PVRIG or anti-TIGIT antibody as described herein to the patient.

[0147] In some embodiments, the present invention provides a method of treating cancer in a patient comprising administering the anti-PVRIG or anti-TIGIT antibody as described herein to the patient.

[0148] In some embodiments, the cancer is selected from the group consisting of prostate cancer, liver cancer (HCC), colorectal cancer, ovarian cancer, endometrial cancer, breast cancer, triple negative breast cancer, pancreatic cancer, stomach (gastric) cancer, cervical cancer, head and neck cancer, thyroid cancer, testis cancer, urothelial cancer, lung cancer (small cell lung, non-small cell lung), melanoma, non melanoma skin cancer (squamous and basal cell carcinoma), glioma, renal cancer (RCC), lymphoma (NHL or HL), Acute myeloid leukemia (AML), T cell Acute Lymphoblastic Leukemia (T-ALL), Diffuse Large B cell lymphoma, testicular germ cell tumors, mesothelioma, esophageal cancer, Merkel Cells cancer, MSI-high cancer, KRAS mutant tumors, adult T-cell leukemia/lymphoma, myeloma, and Myelodysplastic syndromes (MDS).

[0149] In some embodiments, the cancer is selected from the group consisting of triple negative breast cancer, stomach (gastric) cancer, lung cancer (small cell lung, non-small cell lung), Merkel Cells cancer, MSI-high cancer, KRAS mutant tumors, adult T-cell leukemia/lymphoma, myeloma, and Myelodysplastic syndromes (MDS).

[0150] In some embodiments, the present invention provides a method of treating cancer in a patient comprising administering a combination therapy comprising an anti-PVRIG/anti-TIGIT bispecific antibody according to as described herein.

[0151] In some embodiments, the present invention provides a method of treating cancer in a patient comprising administering a combination therapy comprising an anti-PVRIG antibody as described herein and an anti-PD-1 antibody.

[0152] In some embodiments, the anti-PD-1 antibody is an antibody selected from the group consisting of pembrolizumab and nivolumab.

[0153] In some embodiments, the present invention provides a method of treating cancer in a patient comprising administering a combination therapy comprising an anti-TIGIT antibody as described herein and an anti-PD-1 antibody.

[0154] In some embodiments, the anti-PD-1 antibody is an antibody selected from the group consisting of pembrolizumab and nivolumab.

[0155] In some embodiments, the present invention provides a method of treating cancer in a patient comprising administering a combination therapy comprising an anti-TIGIT antibody as described herein and an anti-PVRIG antibody as described herein.

[0156] In some embodiments, the present invention provides a method of treating cancer in a patient comprising administering a triple combination therapy comprising an anti-TIGIT antibody as described herein, an anti-PVRIG antibody, and an anti-PD-1 antibody.

[0157] In some embodiments, the present invention provides a method of treating cancer in a patient comprising administering a triple combination therapy comprising an anti-TIGIT, an anti-PVRIG antibody as described herein, and an anti-PD-1 antibody.

[0158] In some embodiments, the present invention provides a method of treating cancer in a patient comprising administering a triple combination therapy comprising an anti-TIGIT as described herein, an anti-PVRIG antibody as described herein, and an anti-PD-1 antibody.

[0159] In some embodiments, the anti-PD-1 antibody is an antibody selected from the group consisting of pembrolizumab and nivolumab.

[0160] In some embodiments, the present invention provides a method of activating T cells of a patient comprising administering the anti-PVRIG or anti-TIGIT antibody as described herein to the patient, wherein a subset of the T cells of the patient are activated.

[0161] In some embodiments, the present invention provides a method of activating cytotoxic T cells (CTLs) of a patient comprising administering the anti-PVRIG or anti-TIGIT antibody as described herein to the patient, wherein a subset of the CTLs of the patient are activated.

[0162] In some embodiments, the present invention provides a method of activating γδ T cells of a patient comprising administering the anti-PVRIG or anti-TIGIT antibody as described herein to the patient, wherein a subset of the γδ T cells of the patient are activated.

[0163] In some embodiments, the present invention provides a method of activating Th1 cells of a patient comprising administering the anti-PVRIG or anti-TIGIT antibody as described herein to the patient, wherein a subset of the Th1 cells of the patient are activated.

[0164] In some embodiments, the present invention provides a method of decreasing or eliminating cell number and/or activity of at least one of regulatory T cells (Tregs) in a patient comprising administering the anti-PVRIG or anti-TIGIT antibody as described herein to the patient.

[0165] In some embodiments, the present invention provides a method of increasing interferon-γ production and/or pro-inflammatory cytokine secretion in a patient comprising administering the anti-PVRIG or anti-TIGIT as described herein to the patient.

[0166] In some embodiments, the present invention provides a method of treating cancer in a patient comprising administering the anti-PVRIG or anti-TIGIT antibody as described herein to the patient.

[0167] In some embodiments, the cancer is selected from the group consisting of prostate cancer, liver cancer (HCC), colorectal cancer, ovarian cancer, endometrial cancer, breast cancer, triple negative breast cancer, pancreatic cancer, stomach (gastric) cancer, cervical cancer, head and neck cancer, thyroid cancer, testis cancer, urothelial cancer, lung cancer (small cell lung, non-small cell lung), melanoma, non melanoma skin cancer (squamous and basal cell carcinoma), glioma, renal cancer (RCC), lymphoma (NHL or HL), Acute myeloid leukemia (AML), T cell Acute Lymphoblastic Leukemia (T-ALL), Diffuse Large B cell lymphoma, testicular germ cell tumors, mesothelioma, esophageal cancer, Merkel Cells cancer, MSI-high cancer, KRAS mutant tumors, adult T-cell leukemia/lymphoma, myeloma, and Myelodysplastic syndromes (MDS).

[0168] In some embodiments, the cancer is selected from the group consisting of triple negative breast cancer, stomach (gastric) cancer, lung cancer (small cell lung, non-small cell lung), Merkel Cells cancer, MSI-high cancer, KRAS mutant tumors, adult T-cell leukemia/lymphoma, myeloma, and Myelodysplastic syndromes (MDS).

### III. BRIEF DESCRIPTION OF THE DRAWINGS

[0169] FIG. 1 depicts the sequences of human PVRIG (showing two different methionine starting points as well as the full length sequence). The signal peptide is underlined, the ECD is double underlined. PVRIG, also called Poliovirus Receptor Related Immunoglobulin Domain Containing Protein, Q6DKI7 or C7orf15, relates to amino acid and nucleic acid sequences shown in RefSeq accession identifier NP_076975, shown in FIG. 1.

[0170] FIG. 2 depicts the sequence of the human Poliovirus receptor-related 2 protein (PVLR2, also known as nectin-2, CD112 or herpesvirus entry mediator B, (HVEB)), the binding partner of PVRIG. PVLR2 is a human plasma membrane glycoprotein.

[0171] FIG. 3A-3C shows the CDR sequences for Fabs that were determined to successfully block interaction of the PVRIG with its counterpart PVRL2.

[0172] FIGS. 4A-4AA shows the amino acid sequences of the variable heavy and light domains, the full length heavy and light chains, and the variable heavy and variable light CDRs for the enumerated human CPA anti-PVRIG sequences of the invention that both bind PVRIG and block binding of PVRIG and PVLR2.

[0173] FIGS. 5A-5H depicts the amino acid sequences of the variable heavy and light domains, the full length heavy and light chains, and the variable heavy and variable light CDRs for eight human CPA anti-PVRIG sequences of the invention that bind PVRIG and but do not block binding of PVRIG and PVLR2.

[0174] FIGS. 6A-6G depicts the CDRs for all CPA anti-PVRIG antibody sequences that were generated that bind PVRIG, including those that do not block binding of PVRIG and PVLR2.

[0175] FIGS. 7A-7AE depicts the variable heavy and light chains as well as the vhCDR1, vhCDR2, vhCDR3, vlCDR1, vlCDR2 and vlCDR3 sequences of each of the enumerated CHA antibodies of the invention, CHA.7.502, CHA.7.503, CHA.7.506, CHA.7.508, CHA.7.510, CHA.7.512, CHA.7.514, CHA.7.516, CHA.7.518, CHA.7.520.1, CHA.7.520.2, CHA.7.522, CHA.7.524, CHA.7.526, CHA.7.527, CHA.7.528, CHA.7.530, CHA.7.534, CHA.7.535, CHA.7.537, CHA.7.538.1, CHA.7.538.2, CHA.7.543, CHA.7.544, CHA.7.545, CHA.7.546, CHA.7.547, CHA.7.548, CHA.7.549, CHA.7.550, and CHA.7.518.4 (these include the variable heavy and light sequences from mouse sequences (from Hybridomas).

[0176] FIGS. 8A-8D depicts the vhCDR1, vhCDR2, vhCDR3, vlCDR1, vlCDR2 and vlCDR3 sequences of each of the enumerated CPA antibodies of the invention, CPA.7.001 to CPA.7.050 are human sequences (from Phage display).

[0177] FIGS. 9A-9C depicts the sequences of human IgG1, IgG2, IgG3 and IgG4.

[0178] FIG. 10 depicts a number of human PVRIG ECD fragments.

[0179] FIGS. 11A-11I depicts a collation of the humanized sequences of five CHA antibodies.

[0180] FIGS. 12A-12E depicts a collation of the humanized sequences of five CHA antibodies.

[0181] FIG. 13 depicts schemes for combining the humanized VH and VL CHA antibodies of FIGS. 11A-11I and FIGS. 12A-12E. The “chimVH” and “chimVL” are the mouse variable heavy and light sequences attached to a human IgG constant domain.

[0182] FIGS. 14A-14BX show a number of PVRIG sequences and other sequences that find use in the invention.

[0183] FIGS. 15A and 15B depict the variable heavy and light chains as well as the vhCDR1, vhCDR2, vhCDR3, vlCDR1, vlCDR2 and vlCDR3 sequences of each of the enumerated CHA antibodies of the invention, CHA.7.518.1.H4(S241P), and CHA.7.538.1.2.H4(S241P).

[0184] FIG. 16A-16E depict four humanized sequences for each of CHA.7.518, CHA.7.524, CHA.7.530, CHA.7.538_1 and CHA.7.538_2. All humanized antibodies comprise the H4(S241P) substitution. Note that the light chain for CHA.7.538_2 is the same as for CHA.7.538_1. The “H1” of each is a “CDR swap” with no changes to the human framework. Subsequent sequences alter framework changes shown in larger bold font. CDR sequences are noted in bold. CDR definitions are AbM from website www.bioinf.org.uk/abs/. Human germline and joining sequences from IMGT® the international ImMunoGeneTics® information system www.imgt.org (founder and director: Marie-Paule Lefranc, Montpellier, France). Residue numbering shown as sequential (seq) or according to Chothia from website www.bioinf.org.uk/abs/(AbM). “b” notes buried sidechain; “p” notes partially buried; “i” notes sidechain at interface between VH and VL domains. Sequence differences between human and murine germlines noted by asterisk (*). Potential additional mutations in frameworks are noted below sequence. Potential changes in CDR sequences noted below each CDR sequence as noted on the figure (# deamidation substitutions: Q/S/A; these may prevent asparagine (N) deamidation. @ tryptophan oxidation substitutions: Y/F/H; these may prevent tryptophan oxidation; @ methionine oxidation substitutions: L/F/A).

[0185] FIG. 17A to 17C depicts a collation of the humanized sequences of three CHA antibodies: CHA.7.518, CHA.7.538.1, and CHA.7.538.2.

[0186] FIG. 18 depicts schemes for combining the humanized VH and VL CHA antibodies. The “chimVH” and “chimVL” are the mouse variable heavy and light sequences attached to a human IgG constant domain.

[0187] FIG. 19. Sequence alignment of PVRIG orthologs. Aligned sequences of the human, cynomolgus, marmoset, and rhesus PVRIG extra-cellular domain. The differences between human and cynomolgus are highlighted in yellow.

[0188] FIG. 20A-20D depict the amino acid sequences and the nucleic acid sequence for the variable heavy chain (A and B, respectfully) and the amino acid sequences and the nucleic acid sequence for the variable light chain (C and D, respectfully) for AB-407 (BOJ-5G4-F4).

[0189] FIGS. 21A and 21B depicts the amino acid sequences of the constant domains of human IgG1 (with some useful amino acid substitutions), IgG2, IgG3, IgG4, IgG4 with a hinge variant that finds particular use in the present invention, and the constant domains of the kappa and lambda light chains.

[0190] FIG. 22 depicts the sequences of human and cynomolgus macaque (referred to as cyno) TIGIT ECD and of the human PVR ECD proteins.

[0191] FIG. 23A-23D depict the sequences of anti-TIGIT antibodies. Unless otherwise noted, the CDRs utilize the IMGT numbering (including the antibodies of the sequence listing).

[0192] FIG. 24A-24EE depict the sequences of numerous anti-TIGIT antibodies for use in the bispecifc antibodies of the present invention.

[0193] FIG. 25 depicts a schematic of an exemplary bispecific antibody embodiment using the CrossMab Technology (MAbs. 2016 August-September; 8(6): 1010-1020) and knobs in hole technology (Nat Biotechnol. 1998 July; 16(7):677-81).

[0194] FIG. 26A-26B provides the sequences of the heavy and light chains for each arm of the CHA.7.518.1.H4(S241P)/CPA.9.086 bispecific antibody. The variable domains are shown in italics. The CDRs are colored in red. The mutations in the Fc domains are shown in bold and underlined.

[0195] FIG. 27 provides the SPR sensorgrams (black lines) of (A) human TIGIT binding to captured TIGIT-PVRIG Bispecific antibody over two independent surfaces and of (B) human PVRIG binding to captured TIGIT-PVRIG Bispecific antibody over two independent surfaces. The red lines in both (A) and (B) are the global fit of the sensorgrams to a simple 1:1 kinetic binding model. The concentration range of TIGIT was 362 pM-88 nM and the concentration range of PVRIG was 460 pM-112 nM. Because there wasn't sufficient dissociation signal decay data after 15 minutes with the TIGIT antigen, the k_{d} was arbitrarily held constant at 1e⁻⁵ sec⁻¹ for the global fit. When holding kd constant for the TIGIT-bispecific interaction, the ka was estimated to be 3.9e⁶ M⁻¹ sec⁻¹ with the k_{d}/kₐ ratio calculating K_{D}=2.6 pM. The binding constants for the PVRIG-Bispecific antibody interaction were kₐ=1.3e⁶ M⁻¹ sec⁻¹, k_{d}=2.4e⁻⁴ sec⁻¹, and K_{D}=187 pM.

[0196] FIG. 28 depicts SPR “sandwich” assay demonstrating simultaneous binding of human TIGIT and human PVRIG to the anti-TIGIT-PVRIG bispecific antibody. The bispecific antibody is first injected (A) over human TIGIT covalently immobilized to the biosensor chip. Human PVRIG is then injected (B) over the TIGIT-bound bispecific antibody.

[0197] FIGS. 29A-29B depicts characterization of pp65 specific CD8⁺ T cells. A) PBMCs were activated with pp65₍₄₉₅₋₅₀₃₎ peptide, IL-2 and IL-7 for 11 days. Flow cytometry was performed to assess the percentage of pp65 reactive T cells and the expression of PVRIG, TIGIT, and PD-1. Representative gating hierarchy from 1 donor and representative tetramer staining from two donors are shown. From left to right, lymphocytes were gated by forward scatter (FSC)/side scatter (SSC) (upper left), and live CD3⁺CD8⁺ positive cells. Within the CD3⁺CD8⁺ positive population, the percentage of cells that bind HLA-A201 pp65 tetramer is determined and data from 2 donors are shown. B. The expression of PVRIG, TIGIT and PD-1 on the pp65 reactive T cells was evaluated by flow cytometry. The number in the upper right-hand corner denotes the MFIr of the target of interest relative to isotype control.

[0198] FIG. 30 depicts the effect of inhibitory receptor blockade on CMV pp65 reactive CD8 T cells in co-culture with Mel-624 pp65 cancer cell line. CMV pp65 reactive T cells for 2 donors, Donor 4 (A) and Donor 72 (B) were co-cultured with a modified Mel-624 tumor cell line ectopically expressing pp65 in the presence of CHA.7.518.1.H4(S241P) and CPA.9.086 either alone or in combination, CHA.7.518.1.H4(S241P)/CPA.9.086 BsAb or a human IgG isotype control for 18 hrs. Conditioned media were assayed for cytokine secretion. The numbers above the bars indicate the % change relative to isotype control. The bar graphs show the average±standard deviation for IFN-γ (N=2).

[0199] FIG. 31A-31B provides dose-dependent titration of inhibitory receptor blockade on CMV pp65 reactive CD8 T cells in co-culture with Mel-624 pp65 cancer cell line. CMV pp65 reactive T cells for 2 donors, Donor 4 (A) and Donor 72 (B) were co-cultured with a modified Mel-624 tumor cell line ectopically expressing pp65 in the presence of CHA.7.518.1.H4(S241P) and CPA.9.086 either alone or in combination, CHA.7.518.1.H4(S241P)/CPA.9.086 BsAb or a human IgG isotype control for 18 hrs. A 10 point, 4-fold dilution series starting at 20 μg/ml was used for each antibody. Conditioned media were assayed for cytokine secretion. EC₅₀ (nM) values for combined blockade using CHA.7.518.1.H4(S241P) and CPA.9.086 and for the bispecific antibody treatments are reported. Representative data (N=2).

[0200] FIG. 32 provides an overview of Fc heterodimerzation strategies for use in bispecific antibody generation applicable to the bispecific antibodies of the invention. (See, Godar, et. al., Expert Opinion on Therapeutic Patents, 28(3):251-276 (2018).)

[0201] FIG. 33 provides an overview of asymmetric bispecific antibody formats applicable to the bispecific antibodies of the invention. (See, Brinkmann and Kontermann, The making of bispecific antibodies, MAbs, 9(2): 182-212 (2017).)

[0202] FIG. 34 provides an overview of symmetric bispecific antibody formats applicable to the bispecific antibodies of the invention. (See, Brinkmann and Kontermann, The making of bispecific antibodies, MAbs, 9(2): 182-212 (2017).)

[0203] FIG. 35A-35D provides additional anti-PVRIG antibodies for use in the bispecifc antibodies of the present invention.

[0204] FIG. 36 provides the SPR sensorgrams (black lines) of human PVRIg binding to captured PVRIg bispecific and monospecific antibodies. The red lines in both are the global fit of the sensorgrams to a simple 1:1 kinetic binding model. The concentration range of PVRIG was 460 pM-112 nM. (A) CHA.7.518.4-H4 hole+CHA.9.547.18-H4 CrossMab knob, (B) CHA.7.518.4-H4 hole+CPA.9.086-CrossMab H4 knob, (C) CHA.7.518.4-H4 hole+CPA.9.086 scFv (VL-VH)-H4 knob, (D) CHA.7.518.4-H4 hole+CPA.9.086 scFv (VH-VL)-H4 knob, (E) CPA.9.086 scFv (VH-VL) H4 var1+CHA.7.518.1 Fab H4 var2, (F) CHA.7.518.1 scFv (VL-VH) H4 var1+CPA.9.086 Fab H4 var2, (G) CHA.9.547.18 scFv (VH-VL) H4 var1+CHA.7.518.4 Fab H4 var2, (H) CHA.7.518.4 scFv (VL-VH) H4 var1+CHA.9.547.18 Fab H4 var2, (I) CHA.7.518.1 H4, (I) (J) Synagis H4. The binding affinities were estimated from the k_{d}/kₐ ratio (K_{D}) calculation for each antibody and are presented in FIG. 38.

[0205] FIG. 37 provides the SPR sensorgrams (black lines) of human TIGIT binding to captured TIGIT bispecific and monospecific antibodies. The red lines are the global fit of the sensorgrams to a simple 1:1 kinetic binding model. The concentration range of TIGIT was 362 pM-88 nM. (A) CHA.7.518.4-H4 hole+CHA.9.547.18-H4 CrossMab knob, (B) CHA.7.518.4-H4 hole+CPA.9.086-CrossMab H4 knob, (C) CHA.7.518.4-H4 hole+CPA.9.086 scFv (VL-VH)-H4 knob, (D) CHA.7.518.4-H4 hole+CPA.9.086 scFv (VH-VL)-H4 knob, (E) CPA.9.086 scFv (VH-VL) H4 var1+CHA.7.518.1 Fab H4 var2, (F) CHA.7.518.1 scFv (VL-VH) H4 var1+CPA.9.086 Fab H4 var2, (G) CHA.9.547.18 scFv (VH-VL) H4 var1+CHA.7.518.4 Fab H4 var2, (H) CHA.7.518.4 scFv (VL-VH) H4 var1+CHA.9.547.18 Fab H4 var2, (I) CPA.9.086 H4, (J) Synagis H4. The binding affinities were estimated from the k_{d}/kₐ ratio (K_{D}) calculation for each antibody and are presented in FIG. 39.

[0206] FIG. 38 provides the PVRIG binding affinities of bispecific and monospecific antibodies determined by SPR.

[0207] FIG. 39 provides the TIGIT binding affinities of bispecific and monospecific antibodies determined by SPR.

[0208] FIG. 40A-40T provides additional anti-PVRIG antibodies for use in the bispecifc antibodies of the present invention. Red font text indicates amino acid substitutions and ( ) indicates a deletion relative to the reference human IgG4 amino acid sequence. Underlined text indicates CDRs. Grey highlighted text indicates the Fc domains.

[0209] FIG. 41A-41T provides additional anti-TIGIT antibodies for use in the bispecifc antibodies of the present invention. Red font text indicates amino acid substitutions and ( ) indicates a deletion relative to the reference human IgG4 amino acid sequence. Underlined text indicates CDRs. Grey highlighted text indicates the Fc domains.

[0210] FIG. 42 provides a diagram of an exemplary CrossMab bispecific antibody format that has one traditional antibody arm and one in which the heavy chain and light chain constant domains are swapped. Amino acid substitutions for the “knob into hole” format are indicated according to human IgG1 Eu numbering.

[0211] FIG. 43 provides a diagram of an exemplary “bottle opener” bispecific antibody format that has one traditional antibody arm and one scFv-Fc fusion arm. Amino acid substitutions for the “knob into hole” format are indicated according to human IgG1 Eu numbering.

[0212] FIG. 44 provides a diagram of an exemplary “bottle opener” bispecific antibody format that has one traditional antibody arm and one scFv-Fc fusion arm. Amino acid substitutions for the “isovolumetric heterodimerization” format are indicated according to human IgG1 Eu numbering. Additional substitutions that contribute to reduced FcgR binding are indicated.

[0213] FIG. 45 provides data regarding the expression and purification of anti-PVRIG-TIGIT bispecific antibodies, monomer content and % correct assembled bispecific antibody as determined by LC-MS after MabSelect Sure affinity chromatography step and size exclusion chromatography (if % monomer was less than 95% from affinity chromatography).

[0214] FIG. 46A-46C provides data regarding CMV screening assays for anti-PVRIG-TIGIT bispecific antibody screening on three different T-cell donors and performed at 10 ug/ml total antibody concentration per treatment

[0215] FIG. 47 provides flow cytometry examples of PVRIG, TIGIT and PD-1 ligand (PVR, PVRL2 and PD-L1, respectively) expression on recombinant CHO cell lines used in the cell assays.

[0216] FIG. 48 provides flow cytometry examples of PVRIG, TIGIT and PD-1 expression levels in T-cells from three different donors.

[0217] FIG. 49 provides ELISA binding data demonstrating simultaneous binding of both PVRIG and TIGIT for various anti-PVRIG-TIGIT antibodies using a PVRIG coated plate and detecting bound antibodies using biotinylated TIGIT-His and Steptavidin-HRP.

[0218] FIG. 50 provides ELISA binding data demonstrating simultaneous binding of both PVRIG and TIGIT for various anti-PVRIG-TIGIT antibodies using a TIGIT coated plate and detecting bound antibodies using biotinylated PVRIG-His and Steptavidin-HRP.

[0219] FIG. 51 provides EC-50 data for the ELISA assay data provided in FIGS. 49 and 50.

[0220] FIG. 52 provides example stability data of bispecific antibodies in multiple formats as assessed by Differential Scanning Fluorimetry (DSF) and aggregate formation after a low pH hold and 3 cycles of freezing and thaw.

[0221] FIG. 53A-53D provides stability assessment of the different bispecific formats. Tests were performed to simulate viral inactivation by holding the antibodies at pH 3 for various times and to stress test by performing 3 serial freeze/thaw cycles. Changes in the relative amount of heavy chain (scFv or Fab-containing) (A), light chain (B) under reducing conditions or intact molecule (C) in non-reducing conditions (CE-SDS) and in low molecular weight, high molecular weigh, and monomer species content (SEC-UPLC) (D). Data are reported as a change from T=0.

[0222] FIG. 54A-54B FIG. 54A provides an in vitro co-culture assay with human CMV-specific CD8+ T cells from three donors (Donor 4, Donor 210, and Donor 234) were utilized to assess the effect of anti-TIGIT antibodies (CPA.9.086 and CHA.9.547.18) and anti-PVRIG antibodies (CHA.7.518.1, CHA.7.518.4) on antigen-specific cytokine secretion either alone, in combination or as bispecific antibodies. The target cell line used in the assay was the HLA-A2+PVRL2+PVR+expressing melanoma 624 (Mel-624) cell line which has been modified to ectopically express pp65. Cells were plated at 75,000 cells/well in 96-well round-bottom tissue culture treated plates. 15,000 human CD8+ T cells were added to each well. The indicated anti-human PVRIG, TIGIT or isotype control hIgG4 antibodies were added at a concentration of 1 μg/ml. Co-cultures were incubated at 37° C. with 5% CO2 for 24 hours. The amount of human IFNγ in the co-culture supernatant was measured by flow cytometry using a LEGENDplex IFN bead assay (BD Biosciences). The percent increase of IFNγ secretion for each antibody over the hIgG4 isotype is indicated (n=2 experiments, representative results from 1 experiment shown). (A) CHA.7.518.4-H4 hole+CPA.9.086-CrossMab H4 knob, (B) CHA.7.518.4-H4 hole+CPA.9.086 scFv (VH-VL)-H4 knob, (C) CPA.9.086 scFv (VH-VL) H4 var1+CHA.7.518.1 Fab H4 var2, (D) CHA.7.518.1 scFv (VL-VH) H4 var1+CPA.9.086 Fab H4 var2, (E) CHA.7.518.1 H4, (F) CPA.9.086 H4, (G) CHA.7.518.1 H4, (H) CPA.9.086 H4, (I) Synagis H4. FIG. 54B provides a summary of the two CMV assay replicates performed with different expansions of the donor cells.

### IV. DETAILED DESCRIPTION OF THE INVENTION

### A. Overview

[0223] The present invention provides a number of useful anti-PVRIG, anti-TIGIT, and/or anti-PVRIG/anti-TIGIT bispecific antibodies, for use in particular in the treatment of cancer. Cancer can be considered as an inability of the patient to recognize and eliminate cancerous cells. In many instances, these transformed (e.g. cancerous) cells counteract immunosurveillance. There are natural control mechanisms that limit T-cell activation in the body to prevent unrestrained T-cell activity, which can be exploited by cancerous cells to evade or suppress the immune response. Restoring the capacity of immune effector cells-especially T cells-to recognize and eliminate cancer is the goal of immunotherapy. The field of immuno-oncology, sometimes referred to as “immunotherapy” is rapidly evolving, with several recent approvals of T cell checkpoint inhibitory antibodies such as Yervoy, Keytruda and Opdivo. These antibodies are generally referred to as “checkpoint inhibitors” because they block normally negative regulators of T cell immunity. It is generally understood that a variety of immunomodulatory signals, both costimulatory and coinhibitory, can be used to orchestrate an optimal antigen-specific immune response. Generally, these antibodies bind to checkpoint inhibitor proteins such as CTLA-4 or PD-1, which under normal circumstances prevent or suppress activation of cytotoxic T cells (CTLs). By inhibiting the checkpoint protein, for example through the use of antibodies that bind these proteins, an increased T cell response against tumors can be achieved. That is, these cancer checkpoint proteins suppress the immune response; when the proteins are blocked, for example using antibodies to the checkpoint protein, the immune system is activated, leading to immune stimulation, resulting in treatment of conditions such as cancer and infectious disease.

[0224] The present invention is directed to the use of bispecific antibodies to additional checkpoint proteins, PVRIG and TIGIT. PVRIG is expressed on the cell surface of NK and T-cells and shares several similarities to other known immune checkpoints. The identification and methods used to show that PVRIG is a checkpoint receptor are discussed in WO2016/134333, expressly incorporated herein by reference. Anti-PVRIG, anti-TIGIT, and/or anti-PVRIG/anti-TIGIT bispecific antibodies to human PVRIG that block the interaction and/or binding of PVLR2 are provided herein. When PVRIG is bound by its ligand (PVRL2), an inhibitory signal is elicited which acts to attenuate the immune response of NK and T-cells against a target cell (i.e. analogous to PD-1/PDL1). Blocking the binding of PVRL2 to PVRIG shuts-off this inhibitory signal of PVRIG and as a result modulates the immune response of NK and T-cells. Utilizing an antibody against PVRIG that blocks binding to PVRL2 is a therapeutic approach that enhances the killing of cancer cells by NK and T-cells. Blocking antibodies have been generated which bind PVRIG and block the binding of its ligand, PVRL2.

[0225] Similarly, TIGIT has been shown to also have attributes of a checkpoint receptor, and the present invention provides anti-PVRIG, anti-TIGIT, and/or anti-PVRIG/anti-TIGIT bispecific antibodies that block the interaction and/or binding of TIGIT to PVR are provided. When TIGIT is bound by its ligand (PVR), an inhibitory signal is elicited which acts to attenuate the immune response of NK and T-cells against a target cell (i.e. analogous to PD-1/PDL1). Blocking the binding of PVR to TIGIT shuts-off this inhibitory signal of TIGIT and as a result modulates the immune response of NK and T-cells. Utilizing an antibody against TIGIT that blocks binding to PVR is a therapeutic approach that enhances the killing of cancer cells by NK and T-cells. Blocking antibodies have been generated which bind TIGIT and block the binding of its ligand, PVR.

[0226] Additionally, the invention provides anti-PVRIG, anti-TIGIT, and/or anti-PVRIG/anti-TIGIT bispecific antibodiesfor use in the treatment of cancer.

### B. Definitions

[0227] In order that the application may be more completely understood, several definitions are set forth below. Such definitions are meant to encompass grammatical equivalents.

[0228] IgG domain definitions used herein are in accordance with IMGT reference sequences (www.IMGT.org)

[0229] By “ablation” herein is meant a decrease or removal of activity. In some embodiments, it is useful to remove activity from the constant domains of the antibodies. Thus, for example, “ablating FcγR binding” means the Fc region amino acid variant has less than 50% starting binding as compared to an Fc region not containing the specific variant, with less than 70-80-90-95-98% loss of activity being preferred, and in general, with the activity being below the level of detectable binding in a Biacore assay. As shown in FIG. 21A-21B, one ablation variant in the IgG1 constant region is the N297A variant, which removes the native glycosylation site and significantly reduces the FcγRIIIa binding and thus reduces the antibody dependent cell-mediated cytotoxicity (ADCC).

[0230] By “antigen binding domain” or “ABD” herein is meant a set of six Complementary Determining Regions (CDRs) that, when present as part of a polypeptide sequence, specifically binds a target antigen as discussed herein. Thus, a “TIGIT antigen binding domain” binds TIGIT antigen (the sequence of which is shown in FIG. 22) as outlined herein. Similarly, a “PVRIG antibody binding domain” binds PVRIG antigen (the sequence of which is shown in FIG. 1) as outlined herein. As is known in the art, these CDRs are generally present as a first set of variable heavy CDRs (vhCDRs or V_{H}CDRs) and a second set of variable light CDRs (vlCDRs or V_{L}CDRs), each comprising three CDRs: vhCDR1, vhCDR2, vhCDR3 for the heavy chain and vlCDR1, vlCDR2 and vlCDR3 for the light. The CDRs are present in the variable heavy and variable light domains, respectively, and together form an Fv region. Thus, in some cases, the six CDRs of the antigen binding domain are contributed by a variable heavy and variable light chain. In a “Fab” format, the set of 6 CDRs are contributed by two different polypeptide sequences, the variable heavy domain (vh or V_{H}; containing the vhCDR1, vhCDR2 and vhCDR3) and the variable light domain (vl or V_{L}; containing the vlCDR1, vlCDR2 and vlCDR3), with the C-terminus of the vh domain being attached to the N-terminus of the CH1 domain of the heavy chain and the C-terminus of the vl domain being attached to the N-terminus of the constant light domain (and thus forming the light chain). The phrase “antigen binding portion” can comprise an ABD or be synonymous with ABD.

[0231] By “modification” herein is meant an amino acid substitution, insertion, and/or deletion in a polypeptide sequence or an alteration to a moiety chemically linked to a protein. For example, a modification may be an altered carbohydrate or PEG structure attached to a protein. By “amino acid modification” herein is meant an amino acid substitution, insertion, and/or deletion in a polypeptide sequence. For clarity, unless otherwise noted, the amino acid modification is always to an amino acid coded for by DNA, e.g. the 20 amino acids that have codons in DNA and RNA.

[0232] By “amino acid substitution” or “substitution” herein is meant the replacement of an amino acid at a particular position in a parent polypeptide sequence with a different amino acid. In particular, in some embodiments, the substitution is to an amino acid that is not naturally occurring at the particular position, either not naturally occurring within the organism or in any organism. For example, the substitution N297A refers to a variant polypeptide, in this case an Fc variant, in which the asparagine at position 297 is replaced with alanine. For clarity, a protein which has been engineered to change the nucleic acid coding sequence but not change the starting amino acid (for example exchanging CGG (encoding arginine) to CGA (still encoding arginine) to increase host organism expression levels) is not an “amino acid substitution”; that is, despite the creation of a new gene encoding the same protein, if the protein has the same amino acid at the particular position that it started with, it is not an amino acid substitution.

[0233] By “amino acid insertion” or “insertion” as used herein is meant the addition of an amino acid sequence at a particular position in a parent polypeptide sequence. For example, −233E or 233E designates an insertion of glutamic acid after position 233 and before position 234. Additionally, −233ADE or A233ADE designates an insertion of AlaAspGlu after position 233 and before position 234.

[0234] By “amino acid deletion” or “deletion” as used herein is meant the removal of an amino acid sequence at a particular position in a parent polypeptide sequence. For example, E233− or E233#, E233( ) or E233del designates a deletion of glutamic acid at position 233. Additionally, EDA233− or EDA233# designates a deletion of the sequence GluAspAla that begins at position 233.

[0235] By “variant protein” or “protein variant”, or “variant” as used herein is meant a protein that differs from that of a parent protein by virtue of at least one amino acid modification. Protein variant may refer to the protein itself, a composition comprising the protein, or the amino sequence that encodes it. Preferably, the protein variant has at least one amino acid modification compared to the parent protein, e.g. from about one to about seventy amino acid modifications, and preferably from about one to about five amino acid modifications compared to the parent. As described below, in some embodiments the parent polypeptide, for example an Fc parent polypeptide, is a human wild type sequence, such as the Fc region from IgG1, IgG2, IgG3 or IgG4, although human sequences with variants can also serve as “parent polypeptides”. The protein variant sequence herein will preferably possess at least about 80% identity with a parent protein sequence, and most preferably at least about 90% identity, more preferably at least about 95-98-99% identity. Variant protein can refer to the variant protein itself, compositions comprising the protein variant, or the DNA sequence that encodes it. Accordingly, by “antibody variant” or “variant antibody” as used herein is meant an antibody that differs from a parent antibody by virtue of at least one amino acid modification, “IgG variant” or “variant IgG” as used herein is meant an antibody that differs from a parent IgG (again, in many cases, from a human IgG sequence) by virtue of at least one amino acid modification, and “immunoglobulin variant” or “variant immunoglobulin” as used herein is meant an immunoglobulin sequence that differs from that of a parent immunoglobulin sequence by virtue of at least one amino acid modification. “Fc variant” or “variant Fc” as used herein is meant a protein comprising an amino acid modification in an Fc domain. The Fc variants of the present invention are defined according to the amino acid modifications that compose them. Thus, for example, S241P or S228P is a hinge variant with the substitution proline at position 228 relative to the parent IgG4 hinge polypeptide, wherein the numbering S228P is according to the EU index and the S241P is the Kabat numbering. The EU index or EU index as in Kabat or EU numbering scheme refers to the numbering of the EU antibody (Edelman et al., 1969, Proc Natl Acad Sci USA 63:78-85, hereby entirely incorporated by reference.) The modification can be an addition, deletion, or substitution. Substitutions can include naturally occurring amino acids and, in some cases, synthetic amino acids. Examples include U.S. Pat. No. 6,586,207; WO 98/48032; WO 03/073238; US2004-0214988A1; WO 05/35727A2; WO 05/74524A2; J. W. Chin et al., (2002), Journal of the American Chemical Society 124:9026-9027; J. W. Chin, & P. G. Schultz, (2002), ChemBioChem 11:1135-1137; J. W. Chin, et al., (2002), PICAS United States of America 99:11020-11024; and, L. Wang, & P. G. Schultz, (2002), Chem. 1-10, all entirely incorporated by reference.

[0236] As used herein, “protein” herein is meant at least two covalently attached amino acids, which includes proteins, polypeptides, oligopeptides and peptides. The peptidyl group may comprise naturally occurring amino acids and peptide bonds, or synthetic peptidomimetic structures, e.g., “analogs”, such as peptoids (see Simon et al., PNAS USA 89(20):9367 (1992), entirely incorporated by reference). The amino acids may either be naturally occurring or synthetic (e.g. not an amino acid that is coded for by DNA); as will be appreciated by those in the art. For example, homo-phenylalanine, citrulline, ornithine and noreleucine are considered synthetic amino acids for the purposes of the invention, and both D- and L- (R or S) configured amino acids may be utilized. The variants of the present invention may comprise modifications that include the use of synthetic amino acids incorporated using, for example, the technologies developed by Schultz and colleagues, including but not limited to methods described by Cropp & Shultz, 2004, Trends Genet. 20(12):625-30, Anderson et al., 2004, Proc Natl Acad Sci USA 101 (2):7566-71, Zhang et al., 2003, 303(5656):371-3, and Chin et al., 2003, Science 301(5635):964-7, all entirely incorporated by reference. In addition, polypeptides may include synthetic derivatization of one or more side chains or termini, glycosylation, PEGylation, circular permutation, cyclization, linkers to other molecules, fusion to proteins or protein domains, and addition of peptide tags or labels.

[0237] By “residue” as used herein is meant a position in a protein and its associated amino acid identity. For example, Asparagine 297 (also referred to as Asn297 or N297) is a residue at position 297 in the human antibody IgG1.

[0238] By “Fab” or “Fab region” as used herein is meant the polypeptide that comprises the VH, CH1, VL, and CL immunoglobulin domains. Fab may refer to this region in isolation, or this region in the context of a full length antibody or antibody fragment.

[0239] By “Fv” or “Fv fragment” or “Fv region” as used herein is meant a polypeptide that comprises the VL and VH domains of a single antibody. As will be appreciated by those in the art, these generally are made up of two chains.

[0240] By “single chain Fv” or “scFv” herein is meant a variable heavy domain covalently attached to a variable light domain, generally using a scFv linker as discussed herein, to form a scFv or scFv domain. A scFv domain can be in either orientation from N- to C-terminus (vh-linker-vl or vl-linker-vh). In general, the linker is a scFv linker as is generally known in the art, with the linker peptide predominantly including the following amino acid residues: Gly, Ser, Ala, or Thr.

[0241] By “linker” is generally meant a peptide linker that is used in the context of an scFv or a bispecific antibody as described herein. The linker peptide should have a length that is adequate to link two molecules in such a way that they assume the correct conformation relative to one another so that they retain the desired activity. In one embodiment, the linker is from about 1 to 50 amino acids in length, preferably about 1 to 30 amino acids in length. In one embodiment, linkers of 1 to 20 amino acids in length may be used, with from about 5 to about 10 amino acids finding use in some embodiments. Useful linkers include glycine-serine polymers, including for example (GS)n, (GSGGS)n, (GGGGS)n, and (GGGS)n, where n is an integer of at least one (and generally from 3 to 4), glycine-alanine polymers, alanine-serine polymers, and other flexible linkers. Alternatively, a variety of nonproteinaceous polymers, including but not limited to polyethylene glycol (PEG), polypropylene glycol, polyoxyalkylenes, or copolymers of polyethylene glycol and polypropylene glycol, may find use as linkers, that is may find use as linkers. In some embodiments, linkers are selected from those listed in the Tables 1 and 2 below, (see, also, FIG. 7 from U.S. Pat. No. 9,650,446.)

TABLE 1
Positive charged scFv linkers

| | | | | SEQ |
|---|---|---|---|---|
| | | | | ID |
| Name | Sequence | Length | Charge | NO: |
| Gly-Ser 15 | GGGGSGGGGSGGGGS | 15 | 0 | 3632 |
| Whitlow | GSTSGSGKPGSGEGSTKG | 18 | +1 | 3633 |
| linker | | | | |
| 6paxk_1 | IRPRAIGGSKPRVA | 14 | +4 | 3634 |
| (+A) | | | | |
| +B | GKGGSGKGGSGKGGS | 15 | +3 | 3635 |
| +C | GGKGSGGKGSGGKGS | 15 | +3 | 3636 |
| +D | GGGKSGGGKSGGGKS | 15 | +3 | 3637 |
| +E | GKGKSGKGKSGKGKS | 15 | +6 | 3638 |
| +F | GGGKSGGKGSGKGGS | 15 | +3 | 3639 |
| +G | GKPGSGKPGSGKPGS | 15 | +3 | 3640 |
| +H | GKPGSGKPGSGKPGSGKPGS | 20 | +4 | 3641 |
| +I | GKGKSGKGKSGKGKSGKGKS | 20 | +8 | 3642 |

TABLE 2
Negative charged scFv linkers

| | | | | SEQ |
|---|---|---|---|---|
| | | | | ID |
| Name | Sequence | Length | Charge | NO: |
| Gly-Ser 15 | GGGGSGGGGSGGGGSGGGGS | 20 | 0 | 3643 |
| 3hsc2 (−A) | STAGEITHLGGEDFD | 14 | −4 | 3644 |
| −B | GEGGSGEGGSGEGGS | 15 | −3 | 3645 |
| −C | GGEGSGGEGSGGEGS | 15 | −3 | 3646 |
| −D | GGGESGGGESGGGES | 15 | −3 | 3647 |
| −E | GEGESGEGESGEGFS | 1.5 | −6 | 3648 |
| −F | GGGESGGEGSGEGGS | 15 | −3 | 3649 |
| −G | GEGESGEGESGEGESGEGES | 20 | −8 | 3650 |

[0242] By “IgG subclass modification” or “isotype modification” as used herein is meant an amino acid modification that converts one amino acid of one IgG isotype to the corresponding amino acid in a different, aligned IgG isotype. For example, because IgG1 comprises a tyrosine and IgG2 a phenylalanine at EU position 296, a F296Y substitution in IgG2 is considered an IgG subclass modification. Similarly, because IgG1 has a proline at position 241 and IgG4 has a serine there, an IgG4 molecule with a S241P is considered an IgG subclass modification. Note that subclass modifications are considered amino acid substitutions herein.

[0243] By “non-naturally occurring modification” as used herein is meant an amino acid modification that is not isotypic. For example, because none of the IgGs comprise AN asparagine at position 297, the substitution N297A in IgG1, IgG2, IgG3, or IgG4 (or hybrids thereof) is considered a non-naturally occurring modification.

[0244] By “amino acid” and “amino acid identity” as used herein is meant one of the 20 naturally occurring amino acids that are coded for by DNA and RNA.

[0245] By “effector function” as used herein is meant a biochemical event that results from the interaction of an antibody Fc region with an Fc receptor or ligand. Effector functions include but are not limited to ADCC, ADCP, and CDC.

[0246] By “IgG Fc ligand” as used herein is meant a molecule, preferably a polypeptide, from any organism that binds to the Fc region of an IgG antibody to form an Fc/Fc ligand complex. Fc ligands include but are not limited to FcγRls, FcγRlls, FcγRllls, FcRn, C1q, C3, mannan binding lectin, mannose receptor, staphylococcal protein A, streptococcal protein G, and viral FcγR. Fc ligands also include Fc receptor homologs (FcRH), which are a family of Fc receptors that are homologous to the FcγRs (Davis et al., 2002, Immunological Reviews 190:123-136, entirely incorporated by reference). Fc ligands may include undiscovered molecules that bind Fc. Particular IgG Fc ligands are FcRn and Fc gamma receptors. By “Fc ligand” as used herein is meant a molecule, preferably a polypeptide, from any organism that binds to the Fc region of an antibody to form an Fc/Fc ligand complex.

[0247] By “parent polypeptide” as used herein is meant a starting polypeptide that is subsequently modified to generate a variant. The parent polypeptide may be a naturally occurring polypeptide, or a variant or engineered version of a naturally occurring polypeptide. Parent polypeptide may refer to the polypeptide itself, compositions that comprise the parent polypeptide, or the amino acid sequence that encodes it. Accordingly, by “parent immunoglobulin” as used herein is meant an unmodified immunoglobulin polypeptide that is modified to generate a variant, and by “parent antibody” as used herein is meant an unmodified antibody that is modified to generate a variant antibody. It should be noted that “parent antibody” includes known commercial, recombinantly produced antibodies as outlined below.

[0248] By “Fc” or “Fc region” or “Fc domain” as used herein is meant the polypeptide comprising the constant region of an antibody excluding the first constant region immunoglobulin domain and in some cases, part of the hinge. Thus Fc refers to the last two constant region immunoglobulin domains of IgA, IgD, and IgG, the last three constant region immunoglobulin domains of IgE and IgM, and the flexible hinge N-terminal to these domains. For IgA and IgM, Fc may include the J chain. For IgG, the Fc domain comprises immunoglobulin domains Cγ2 and Cγ3 (Cγ2 and Cγ3) and the lower hinge region between Cγ1 (Cγ1) and Cγ2 (Cγ2). Although the boundaries of the Fc region may vary, the human IgG heavy chain Fc region is usually defined to include residues C226 or P230 to its carboxyl-terminus, wherein the numbering is according to the EU index as in Kabat. In some embodiments, as is more fully described below, amino acid modifications are made to the Fc region, for example to alter binding to one or more FcγR receptors or to the FcRn receptor.

[0249] By “heavy constant region” herein is meant the CH1-hinge-CH2-CH3 portion of an antibody.

[0250] By “position” as used herein is meant a location in the sequence of a protein. Positions may be numbered sequentially, or according to an established format, for example the EU index for antibody numbering.

[0251] By “target antigen” as used herein is meant the molecule that is bound specifically by the variable region of a given antibody. In the present case, one target antigen of interest herein is TIGIT, usually human TIGIT and optionally cyno TIGIT, as defined below. Another target antigen of interest is PVRIG, usually human PVRIG and optionally cyno PVRIG, as defined below.

[0252] By “target cell” as used herein is meant a cell that expresses a target antigen.

[0253] By “variable region” as used herein is meant the region of an immunoglobulin that comprises one or more Ig domains substantially encoded by any of the Vκ (V.kappa), Vλ (V.lamda), and/or VH genes that make up the kappa, lambda, and heavy chain immunoglobulin genetic loci respectively.

[0254] By “wild type or WT” herein is meant an amino acid sequence or a nucleotide sequence that is found in nature, including allelic variations. A WT protein has an amino acid sequence or a nucleotide sequence that has not been intentionally modified.

[0255] The antibodies of the present invention are generally isolated or recombinant. “Isolated,” when used to describe the various polypeptides disclosed herein, means a polypeptide that has been identified and separated and/or recovered from a cell or cell culture from which it was expressed. Ordinarily, an isolated polypeptide will be prepared by at least one purification step. An “isolated antibody,” refers to an antibody which is substantially free of other antibodies having different antigenic specificities. “Recombinant” means the antibodies are generated using recombinant nucleic acid techniques in exogeneous host cells.

[0256] “Specific binding” or “specifically binds to” or is “specific for” a particular antigen or an epitope means binding that is measurably different from a non-specific interaction. Specific binding can be measured, for example, by determining binding of a molecule compared to binding of a control molecule, which generally is a molecule of similar structure that does not have binding activity. For example, specific binding can be determined by competition with a control molecule that is similar to the target.

[0257] Specific binding for a particular antigen or an epitope can be exhibited, for example, by an antibody having a KD for an antigen or epitope of at least about 10⁻⁹ M, at least about 10⁻¹⁰ M, at least about 10⁻¹¹ M, at least about 10⁻¹² M, at least about 10⁻¹³ M, at least about 10⁻¹⁴ M, at least about 10⁻¹⁵ M, where KD refers to a dissociation rate of a particular antibody-antigen interaction. Typically, an antibody that specifically binds an antigen will have a KD that is 20-, 50-, 100-, 500-, 1000-, 5,000-, 10,000- or more times greater for a control molecule relative to the antigen or epitope.

[0258] Also, specific binding for a particular antigen or an epitope can be exhibited, for example, by an antibody having a KA or Ka for an antigen or epitope of at least 20-, 50-, 100-, 500-, 1000-, 5,000-, 10,000- or more times greater for the epitope relative to a control, where KA or Ka refers to an association rate of a particular antibody-antigen interaction. Binding affinity is generally measured using surface plasmon resonance (e.g. Biacore assay) and flow cytometry with antigen-expressing cells.

### C. Sequences

[0259] The sequence listing provides a number of sequences based on the Format of FIG. 23A-23D; reference is made to FIG. 4 of U.S. Ser. No. 62/513,916 (hereby expressly incorporated by reference) as a guide to the labeling of the sequences. The variable heavy domain is labeled with the identifier (e.g., “CPA.9.086”), with the next sequence following the format of FIG. 23A-23D of the present specification (identical to the format of FIG. 4, referenced above), in that the next sequence identifier is to the vhCDR1, the next to vhCDR2, with vhCDR3, the full length heavy chain, the variable light domain, vlCDR1, vlCDR2, vlCDR3 and the full length light chain. Thus an individual antibody has 10 associated sequence identifiers). Included in the sequence listing are the sequences of BM26 mouse IgG1 (BM26-M1) (WO2016/028656A1, Clone 3106) and BM29 mouse IgG1 (BM29-M1) (US2016/0176963A1, Clone 22G2). Unless noted, the full length HC sequences of the PVRIG and/or TIGIT antibodies are in the H4(S241P) format.

### D. PVRIG Proteins

[0260] The present invention provides anti-PVRIG and/or anti-PVRIG/anti-TIGIT bispecific antibodies that specifically bind to PVRIG proteins and prevent activation by its ligand protein, PVRL2, a human plasma membrane glycoprotein. PVRIG, also called Poliovirus Receptor Related Immunoglobulin Domain Containing Protein, Q6DKI7 or C7orf15, relates to amino acid and nucleic acid sequences shown in RefSeq accession identifier NP_076975, shown in FIG. 1. The sequence of human Poliovirus receptor-related 2 protein (PVLR2, also known as nectin-2, CD112 or herpesvirus entry mediator B, (HVEB)), the binding partner of PVRIG (as shown in Example 5 of US Publication 2016/0244521), is shown in FIG. 2. The anti-PVRIG/anti-TIGIT bispecific antibodies of the invention are specific for the PVRIG extracellular domain such that the binding of PVRIG and PVLR2 is blocked.

[0261] PVRIG is a transmembrane domain protein of 326 amino acids in length, with a signal peptide (spanning from amino acid 1 to 40), an extracellular domain (spanning from amino acid 41 to 171), a transmembrane domain (spanning from amino acid 172 to 190) and a cytoplasmic domain (spanning from amino acid 191 to 326). There are two methionines that can be start codons, but the mature proteins are identical.

[0262] Accordingly, as used herein, the term “PVRIG” or “PVRIG protein” or “PVRIG polypeptide” may optionally include any such protein, or variants, conjugates, or fragments thereof, including but not limited to known or wild type PVRIG, as described herein, as well as any naturally occurring splice variants, amino acid variants or isoforms, and in particular the ECD fragment of PVRIG.

[0263] As noted herein and more fully described below, anti-PVRIG and/or anti-PVRIG/anti-TIGIT bispecific antibodiesthat both bind to PVRIG and prevent activation by PVRL2 (e.g. most commonly by blocking the interaction of PVRIG and PVLR2), are used to enhance T cell and/or NK cell activation and be used in treating diseases such as cancer and pathogen infection.

### E. TIGIT Proteins

[0264] The present invention provides anti-TIGIT, and/or anti-PVRIG/anti-TIGIT bispecific antibodiesthat specifically bind to TIGIT proteins and prevent activation by its ligand protein, PVR, poliovirus receptor (aka CD155) a human plasma membrane glycoprotein. TIGIT, or T cell immunoreceptor with Ig and ITIM domains, is a co-inhibiotry receptor protein also known as WUCAM, Vstm3 or Vsig9. TIGIT has an immunoglobulin variable domain, a transmembrane domain, and an immunoreceptor tyrosine-based inhibitory motif (ITIM) and contains signature sequence elements of the PVR protein family. The extracellular domain (ECD) sequences of TIGIT and of PVR are shown in FIG. 22. The antibodies of the invention are specific for the TIGIT ECD such that the binding of TIGIT and PVR is blocked

[0265] Accordingly, as used herein, the term “TIGIT” or “TIGIT protein” or “TIGIT polypeptide” may optionally include any such protein, or variants, conjugates, or fragments thereof, including but not limited to known or wild type TIGIT, as described herein, as well as any naturally occurring splice variants, amino acid variants or isoforms, and in particular the ECD fragment of TIGIT.

[0266] As noted herein and more fully described below, anti-TIGIT antibodies (including antigen-binding fragments) that both bind to TIGIT and prevent activation by PVR (e.g., most commonly by blocking the interaction of TIGIT and PVR), are used to enhance T cell and/or NK cell activation and be used in treating diseases such as cancer and pathogen infection.

### V. ANTIBODIES

[0267] As is discussed below, the term “antibody” is used generally. Traditional antibody structural units typically comprise a tetramer. Each tetramer is typically composed of two identical pairs of polypeptide chains, each pair having one “light” (typically having a molecular weight of about 25 kDa) and one “heavy” chain (typically having a molecular weight of about 50-70 kDa). Human light chains are classified as kappa and lambda light chains. The present invention is directed to monoclonal antibodies that generally are based on the IgG class, which has several subclasses, including, but not limited to IgG1, IgG2, IgG3, and IgG4. In general, IgG1, IgG2 and IgG4 are used more frequently than IgG3. It should be noted that IgG1 has different allotypes with polymorphisms at 356 (D or E) and 358 (L or M). The sequences depicted herein use the 356D/358M allotype, however the other allotype is included herein. That is, any sequence inclusive of an IgG1 Fc domain included herein can have 356E/358L replacing the 356D/358M allotype. The term antibody further includes bispecific antibodies, for example, those antibodies that bind to at least two different targets. In some embodiments, the antibodies of the invention are bispecific antibodies that bind PVRIG and TIGIT (refereed to herein as anti-TIGIT/anti-PVRIG bispecific antibodies).

[0268] The amino-terminal portion of each chain includes a variable region of about 100 to 110 or more amino acids primarily responsible for antigen recognition, generally referred to in the art and herein as the “Fv domain” or “Fv region”. In the variable region, three loops are gathered for each of the V domains of the heavy chain and light chain to form an antigen-binding site. Each of the loops is referred to as a complementarity-determining region (hereinafter referred to as a “CDR”), in which the variation in the amino acid sequence is most significant. “Variable” refers to the fact that certain segments of the variable region differ extensively in sequence among antibodies. Variability within the variable region is not evenly distributed. Instead, the V regions consist of relatively invariant stretches called framework regions (FRs) of 15-30 amino acids separated by shorter regions of extreme variability called “hypervariable regions” that are each 9-15 amino acids long or longer.

[0269] Each VH and VL is composed of three hypervariable regions (“complementary determining regions,” “CDRs”) and four FRs, arranged from amino-terminus to carboxy-terminus in the following order: FR1-CDR1-FR2-CDR2-FR3-CDR3-FR4.

[0270] The hypervariable region generally encompasses amino acid residues from about amino acid residues 24-34 (LCDR1; “L” denotes light chain), 50-56 (LCDR2) and 89-97 (LCDR3) in the light chain variable region and around about 31-35B (HCDR1; “H” denotes heavy chain), 50-65 (HCDR2), and 95-102 (HCDR3) in the heavy chain variable region; Kabat et al., SEQUENCES OF PROTEINS OF IMMUNOLOGICAL INTEREST, 5th Ed. Public Health Service, National Institutes of Health, Bethesda, Md. (1991) and/or those residues forming a hypervariable loop (e.g. residues 26-32 (LCDR1), 50-52 (LCDR2) and 91-96 (LCDR3) in the light chain variable region and 26-32 (HCDR1), 53-55 (HCDR2) and 96-101 (HCDR3) in the heavy chain variable region; Chothia and Lesk (1987) J. Mol. Biol. 196:901-917. Specific CDRs of the invention are described below.

[0271] As will be appreciated by those in the art, the exact numbering and placement of the CDRs can be different among different numbering systems. However, it should be understood that the disclosure of a variable heavy and/or variable light sequence includes the disclosure of the associated (inherent) CDRs. Accordingly, the disclosure of each variable heavy region is a disclosure of the vhCDRs (e.g. vhCDR1, vhCDR2 and vhCDR3) and the disclosure of each variable light region is a disclosure of the vlCDRs (e.g. vlCDR1, vlCDR2 and vlCDR3). A useful comparison of CDR numbering is as below, see Lafranc et al., Dev. Comp. Immunol. 27(1):55-77 (2003):

| | Kabat + | | | | | |
|---|---|---|---|---|---|---|
| | Clothia | IMGT | Kabat | AbM | Chothia | Contact |
| vhCDR1 | 26-35 | 27-38 | 31-35 | 26-35 | 26-32 | 30-35 |
| vhCDR2 | 50-65 | 56-65 | 50-65 | 50-58 | 53-55 | 47-58 |
| vhCDR3 | 95-102 | 105-117 | 95-102 | 95-102 | 96-101 | 93-101 |
| vlCDR1 | 24-34 | 27-38 | 24-34 | 24-34 | 26-32 | 30-36 |
| vlCDR2 | 50-56 | 56-65 | 50-56 | 50-56 | 50-52 | 46-55 |
| vlCDR3 | 89-97 | 105-117 | 89-97 | 89-97 | 91-96 | 89-96 |

[0272] Throughout the present specification, the Kabat numbering system is generally used when referring to a residue in the variable domain (approximately, residues 1-107 of the light chain variable region and residues 1-113 of the heavy chain variable region) and the hinge and the EU numbering system for Fc regions (e.g, Kabat et al., supra (1991)).

[0273] The present invention provides a large number of different CDR sets. In this case, a “full CDR set” comprises the three variable light and three variable heavy CDRs, e.g. a vlCDR1, vlCDR2, vlCDR3, vhCDR1, vhCDR2 and vhCDR3. These can be part of a larger variable light or variable heavy domain, respectfully. In addition, as more fully outlined herein, the variable heavy and variable light domains can be on separate polypeptide chains, when a heavy and light chain is used, or on a single polypeptide chain in the case of scFv sequences.

[0274] The CDRs contribute to the formation of the antigen-binding, or more specifically, epitope binding site of antibodies. “Epitope” refers to a determinant that interacts with a specific antigen binding site in the variable region of an antibody molecule known as a paratope. Epitopes are groupings of molecules such as amino acids or sugar side chains and usually have specific structural characteristics, as well as specific charge characteristics. A single antigen may have more than one epitope.

[0275] The epitope may comprise amino acid residues directly involved in the binding (also called immunodominant component of the epitope) and other amino acid residues, which are not directly involved in the binding, such as amino acid residues which are effectively blocked by the specifically antigen binding peptide; in other words, the amino acid residue is within the footprint of the specifically antigen binding peptide.

[0276] Epitopes may be either conformational or linear. A conformational epitope is produced by spatially juxtaposed amino acids from different segments of the linear polypeptide chain. A linear epitope is one produced by adjacent amino acid residues in a polypeptide chain. Conformational and non-conformational epitopes may be distinguished in that the binding to the former but not the latter is lost in the presence of denaturing solvents.

[0277] An epitope typically includes at least 3, and more usually, at least 5 or 8-10 amino acids in a unique spatial conformation. Antibodies that recognize the same epitope can be verified in a simple immunoassay showing the ability of one antibody to block the binding of another antibody to a target antigen, for example “binning.” As outlined below, the invention not only includes the enumerated antigen binding domains and antibodies herein, but those that compete for binding with the epitopes bound by the enumerated antigen binding domains.

[0278] The carboxy-terminal portion of each chain defines a constant region primarily responsible for effector function. Kabat et al. collected numerous primary sequences of the variable regions of heavy chains and light chains. Based on the degree of conservation of the sequences, they classified individual primary sequences into the CDR and the framework and made a list thereof (see SEQUENCES OF IMMUNOLOGICAL INTEREST, 5th edition, NIH publication, No. 91-3242, E. A. Kabat et al., entirely incorporated by reference).

[0279] In the IgG subclass of immunoglobulins, there are several immunoglobulin domains in the heavy chain. By “immunoglobulin (Ig) domain” herein is meant a region of an immunoglobulin having a distinct tertiary structure. Of interest in the present invention are the heavy chain domains, including, the constant heavy (CH) domains and the hinge domains. In the context of IgG antibodies, the IgG isotypes each have three CH regions. Accordingly, “CH” domains in the context of IgG are as follows: “CH1” refers to positions 118-220 according to the EU index as in Kabat. “CH2” refers to positions 237-340 according to the EU index as in Kabat, and “CH3” refers to positions 341-447 according to the EU index as in Kabat.

[0280] Another type of Ig domain of the heavy chain is the hinge region. By “hinge” or “hinge region” or “antibody hinge region” or “immunoglobulin hinge region” herein is meant the flexible polypeptide comprising the amino acids between the first and second constant domains of an antibody. Structurally, the IgG CH1 domain ends at EU position 220, and the IgG CH2 domain begins at residue EU position 237. Thus for IgG the antibody hinge is herein defined to include positions 221 (D221 in IgG1) to 236 (G236 in IgG1), wherein the numbering is according to the EU index as in Kabat.

[0281] The light chain generally comprises two domains, the variable light domain (containing the light chain CDRs and together with the variable heavy domains forming the Fv region), and a constant light chain region (often referred to as CL or Cκ). In general, either the constant lambda or constant kappa domain can be used, with lambda generally finding use in the invention.

[0282] Another region of interest for additional substitutions, outlined below, is the Fc region.

[0283] A. Chimeric and Humanized Antibodies

[0284] In some embodiments, the anti-PVRIG/anti-TIGIT bispecific antibodies herein can be derived from a mixture from different species, e.g. a chimeric antibody and/or a humanized antibody. In general, both “chimeric antibodies” and “humanized antibodies” refer to antibodies that combine regions from more than one species. For example, “chimeric antibodies” traditionally comprise variable region(s) from a mouse (or rat, in some cases) and the constant region(s) from a human. “Humanized antibodies” generally refer to non-human antibodies that have had the variable-domain framework regions swapped for sequences found in human antibodies. Generally, in a humanized antibody, the entire antibody, except the CDRs, is encoded by a polynucleotide of human origin or is identical to such an antibody except within its CDRs. The CDRs, some or all of which are encoded by nucleic acids originating in a non-human organism, are grafted into the beta-sheet framework of a human antibody variable region to create an antibody, the specificity of which is determined by the engrafted CDRs. The creation of such antibodies is described in, e.g., WO 92/11018, Jones, 1986, Nature 321:522-525, Verhoeyen et al., 1988, Science 239:1534-1536, all entirely incorporated by reference. “Backmutation” of selected acceptor framework residues to the corresponding donor residues is often required to regain affinity that is lost in the initial grafted construct (U.S. Pat. Nos. 5,530,101; 5,585,089; 5,693,761; 5,693,762; 6,180,370; 5,859,205; 5,821,337; 6,054,297; 6,407,213, all entirely incorporated by reference). The humanized antibody optimally also will comprise at least a portion, and usually all, of an immunoglobulin constant region, typically that of a human immunoglobulin, and thus will typically comprise a human Fc region. Humanized antibodies can also be generated using mice with a genetically engineered immune system. Roque et al., 2004, Biotechnol. Prog. 20:639-654, entirely incorporated by reference. A variety of techniques and methods for humanizing and reshaping non-human antibodies are well known in the art (See Tsurushita & Vasquez, 2004, Humanization of Monoclonal Antibodies, Molecular Biology of B Cells, 533-545, Elsevier Science (USA), and references cited therein, all entirely incorporated by reference). Humanization methods include but are not limited to methods described in Jones et al., 1986, Nature 321:522-525; Riechmann et al.,1988; Nature 332:323-329; Verhoeyen et al., 1988, Science, 239:1534-1536; Queen et al., 1989, Proc Natl Acad Sci, USA 86:10029-33; He et al., 1998, J. Immunol. 160: 1029-1035; Carter et al., 1992, Proc Natl Acad Sci USA 89:4285-9, Presta et al., 1997, Cancer Res. 57(20):4593-9; Gorman et al., 1991, Proc. Natl. Acad. Sci. USA 88:4181-4185; O'Connor et al., 1998, Protein Eng 11:321-8, all entirely incorporated by reference. Humanization or other methods of reducing the immunogenicity of nonhuman antibody variable regions may include resurfacing methods, as described for example in Roguska et al., 1994, Proc. Natl. Acad. Sci. USA 91:969-973, entirely incorporated by reference.

[0285] Thus, the vhCDRs and vlCDRs from any of the enumerated antibodies herein may be humanized (or “rehumanized”, for those that were already humanized).

[0286] In certain embodiments, the antibodies of the invention comprise a heavy chain variable region from a particular germline heavy chain immunoglobulin gene and/or a light chain variable region from a particular germline light chain immunoglobulin gene. For example, such antibodies may comprise or consist of a human antibody comprising heavy or light chain variable regions that are “the product of” or “derived from” a particular germline sequence. A human antibody that is “the product of” or “derived from” a human germline immunoglobulin sequence can be identified as such by comparing the amino acid sequence of the human antibody to the amino acid sequences of human germline immunoglobulins and selecting the human germline immunoglobulin sequence that is closest in sequence (i.e., greatest % identity) to the sequence of the human antibody. A human antibody that is “the product of” or “derived from” a particular human germline immunoglobulin sequence may contain amino acid differences as compared to the germline sequence, due to, for example, naturally-occurring somatic mutations or intentional introduction of site-directed mutation. However, a humanized antibody typically is at least 90% identical in amino acids sequence to an amino acid sequence encoded by a human germline immunoglobulin gene and contains amino acid residues that identify the antibody as being derived from human sequences when compared to the germline immunoglobulin amino acid sequences of other species (e.g., murine germline sequences). In certain cases, a humanized antibody may be at least 95, 96, 97, 98 or 99%, or even at least 96%, 97%, 98%, or 99% identical in amino acid sequence to the amino acid sequence encoded by the germline immunoglobulin gene excluding the CDRs. That is, the CDRs may be murine, but the framework regions of the variable region (either heavy or light) can be at least 96%, 97%, 98%, or 99% identical in amino acid sequence to the framework amino acids encoded by one human germline immunoglobulin gene.

[0287] Typically, a humanized antibody derived from a particular human germline sequence will display no more than 10-20 amino acid differences from the amino acid sequence encoded by the human germline immunoglobulin gene. In certain cases, the humanized antibody may display no more than 5, or even no more than 4, 3, 2, or 1 amino acid difference from the amino acid sequence encoded by the germline immunoglobulin gene (again, prior to the introduction of any variants herein; that is, the number of variants is generally low).

[0288] In one embodiment, the parent antibody has been affinity matured, as is known in the art. Structure-based methods may be employed for humanization and affinity maturation, for example as described in U.S. Ser. No. 11/004,590. Selection based methods may be employed to humanize and/or affinity mature antibody variable regions, including but not limited to methods described in Wu et al., 1999, J. Mol. Biol. 294:151-162; Baca et al., 1997, J. Biol. Chem. 272(16):10678-10684; Rosok et al., 1996, J. Biol. Chem. 271(37): 22611-22618; Rader et al., 1998, Proc. Natl. Acad. Sci. USA 95: 8910-8915; Krauss et al., 2003, Protein Engineering 16(10):753-759, all entirely incorporated by reference. Other humanization methods may involve the grafting of only parts of the CDRs, including but not limited to methods described in U.S. Ser. No. 09/810,510; Tan et al., 2002, J. Immunol. 169:1119-1125; De Pascalis et al., 2002, J. Immunol. 169:3076-3084, all entirely incorporated by reference.

[0289] B. Optional Antibody Engineering

[0290] The anti-PVRIG/anti-TIGIT bispecific antibodies of the invention can be modified, or engineered, to alter the amino acid sequences by amino acid substitutions. As discussed herein, amino acid substitutions can be made to alter the affinity of the CDRs for the protein (e.g., TIGIT or PVRIG, including both increasing and decreasing binding), as well as to alter additional functional properties of the antibodies. For example, the antibodies may be engineered to include modifications within the Fc region, typically to alter one or more functional properties of the antibody, such as serum half-life, complement fixation, Fc receptor binding, and/or antigen-dependent cellular cytotoxicity. Furthermore, an antibody according to at least some embodiments of the invention may be chemically modified (e.g., one or more chemical moieties can be attached to the antibody) or be modified to alter its glycosylation, again to alter one or more functional properties of the antibody. Such embodiments are described further below. The numbering of residues in the Fc region is that of the EU index of Kabat.

[0291] In one embodiment, the hinge region of Cut is modified such that the number of cysteine residues in the hinge region is altered, e.g., increased or decreased. This approach is described further in U.S. Pat. No. 5,677,425 by Bodmer et al. The number of cysteine residues in the hinge region of CH1 is altered to, for example, facilitate assembly of the light and heavy chains or to increase or decrease the stability of the antibody.

[0292] In still another embodiment, the anti-PVRIG/anti-TIGIT bispecific antibodies can be modified to abrogate in vivo Fab arm exchange, in particular when IgG4 constant domains are used. Specifically, this process involves the exchange of IgG4 half-molecules (one heavy chain plus one light chain) between other IgG4 antibodies that effectively results in bispecific antibodies which are functionally monovalent. Mutations to the hinge region and constant domains of the heavy chain can abrogate this exchange (see Aalberse, R C, Schuurman J., 2002, Immunology 105:9-19). As outlined herein, a mutation that finds particular use in the present invention is the S241P in the context of an IgG4 constant domain. IgG4 finds use in the present invention as it has no significant effector function, and is thus used to block the receptor binding to its ligand without cell depletion (e.g. PVRIG to PVRL2 or TIGIT to PVR).

[0293] In some embodiments, amino acid substitutions can be made in the Fc region, in general for altering binding to FcγR receptors. By “Fc gamma receptor”, “FcγR” or “FcgammaR” as used herein is meant any member of the family of proteins that bind the IgG antibody Fc region and is encoded by an FcγR gene. In humans this family includes but is not limited to FcγRI (CD64), including isoforms FcγRIa, FcγRIb, and FcγRIc; FcγRII (CD32), including isoforms FcγRIIa (including allotypes H131 and R131), FcγRIIb (including FcγRIIb-1 and FcγRIIb-2), and FcγRIIc; and FcγRIII (CD16), including isoforms FcγRIIIa (including allotypes V158 and F158) and FcγRIIIb (including allotypes FcγRIIIb-NA1 and FcγRIIIb-NA2) (Jefferis et al., 2002, Immunol Lett 82:57-65, entirely incorporated by reference), as well as any undiscovered human FcγRs or FcγR isoforms or allotypes. An FcγR may be from any organism, including but not limited to humans, mice, rats, rabbits, and monkeys. Mouse FcγRs include but are not limited to FcγRI (CD64), FcγRII (CD32), FcγRIII-1 (CD16), and FcγRIII-2 (CD16-2), as well as any undiscovered mouse FcγRs or FcγR isoforms or allotypes.

[0294] There are a number of useful Fc substitutions that can be made to alter binding to one or more of the FcγR receptors. Substitutions that result in increased binding as well as decreased binding can be useful. For example, it is known that increased binding to FcγRIIIa generally results in increased ADCC (antibody dependent cell-mediated cytotoxicity; the cell-mediated reaction wherein nonspecific cytotoxic cells that express FcγRs recognize bound antibody on a target cell and subsequently cause lysis of the target cell. Similarly, decreased binding to FcγRIIb (an inhibitory receptor) can be beneficial as well in some circumstances. Amino acid substitutions that find use in the present invention include those listed in U.S. Ser. No. 11/124,620 (particularly FIG. 41) and U.S. Pat. No. 6,737,056, both of which are expressly incorporated herein by reference in their entirety and specifically for the variants disclosed therein.

[0295] In yet another example, the Fc region is modified to increase the ability of the anti-PVRIG/anti-TIGIT bispecific antibodies to mediate antibody dependent cellular cytotoxicity (ADCC) and/or to increase the affinity of the antibody for an Fcγ receptor, and/or increase FcRn binding, by modifying one or more amino acids at the following positions: 238, 239, 248, 249, 252, 254, 255, 256, 258, 265, 267, 268, 269, 270, 272, 276, 278, 280, 283, 285, 286, 289, 290, 292, 293, 294, 295, 296, 298, 301, 303, 305, 307, 309, 312, 315, 320, 322, 324, 326, 327, 329, 330, 331, 333, 334, 335, 337, 338, 340, 360, 373, 376, 378, 382, 388, 389, 398, 414, 416, 419, 430, 434, 435, 437, 438 or 439. This approach is described further in PCT Publication WO 00/42072 by Presta. Moreover, the binding sites on human IgG1 for FcγRI, FcγRII, FcγRIII and FcRn have been mapped and variants with improved binding have been described (see Shields, R. L. et al. (2001) J. Biol. Chem. 276:6591-6604). Specific mutations at positions 256, 290, 298, 333, 334 and 339 are shown to improve binding to FcγRIII. Additionally, the following combination mutants are shown to improve FcγRIII binding: T256A/S298A, S298A/E333A, S298A/K224A and S298A/E333A/K334A. Furthermore, mutations such as M252Y/S254T/T256E or M428L/N434S improve binding to FcRn and increase antibody circulation half-life (see Chan C A and Carter P J (2010) Nature Rev Immunol 10:301-316).

[0296] In addition, the anti-PVRIG/anti-TIGIT bispecific antibodies of the invention are modified to increase its biological half-life. Various approaches are possible. For example, one or more of the following mutations can be introduced: T252L, T254S, T256F, as described in U.S. Pat. No. 6,277,375 to Ward. Alternatively, to increase the biological half-life, the antibody can be altered within the C_{H1} or C_{L} region to contain a salvage receptor binding epitope taken from two loops of a CH2 domain of an Fc region of an IgG, as described in U.S. Pat. Nos. 5,869,046 and 6,121,022 by Presta et al. Additional mutations to increase serum half-life are disclosed in U.S. Pat. Nos. 8,883,973, 6,737,056 and 7,371,826 and include 428L, 434A, 434S, and 428L/434S.

[0297] In still another embodiment, the glycosylation of an anti-PVRIG/anti-TIGIT bispecific antibody can be modified. For example, an aglycosylated antibody can be made (e.g., the antibody lacks glycosylation). Glycosylation can be altered to, for example, increase the affinity of the antibody for antigen or reduce effector function such as ADCC. Such carbohydrate modifications can be accomplished by, for example, altering one or more sites of glycosylation within the antibody sequence, for example N297. For example, one or more amino acid substitutions can be made that result in elimination of one or more variable region framework glycosylation sites to thereby eliminate glycosylation at that site, with an alanine replacement finding use in some embodiments.

[0298] Additionally or alternatively, an anti-PVRIG/anti-TIGIT bispecific antibody can be made that has an altered type of glycosylation, such as a hypofucosylated antibody having reduced amounts of fucosyl residues or an antibody having increased bisecting GlcNac structures. Such altered glycosylation patterns have been demonstrated to increase the ADCC ability of antibodies. Such carbohydrate modifications can be accomplished by, for example, expressing the antibody in a host cell with altered glycosylation machinery. Cells with altered glycosylation machinery have been described in the art and can be used as host cells in which to express recombinant antibodies according to at least some embodiments of the invention to thereby produce an antibody with altered glycosylation. See for example, U.S. Patent Publication No. 20040110704 and WO 2003/035835.

[0299] Another modification of the anti-PVRIG/anti-TIGIT bispecific antibodies herein that is contemplated by the invention is PEGylation or the addition of other water soluble moieties, typically polymers, e.g., in order to enhance half-life. An antibody can be PEGylated to, for example, increase the biological (e.g., serum) half-life of the antibody as is known in the art.

[0300] In addition to substitutions made to alter binding affinity to FcγRs and/or FcRn and/or increase in vivo serum half-life, additional antibody modifications can be made, as described in further detail below.

[0301] In some cases, affinity maturation is done. Amino acid modifications in the CDRs are sometimes referred to as “affinity maturation”. An “affinity matured” antibody is one having one or more alteration(s) in one or more CDRs which results in an improvement in the affinity of the antibody for antigen, compared to a parent antibody which does not possess those alteration(s). In some cases, it may be desirable to decrease the affinity of an antibody to its antigen.

[0302] In some embodiments, one or more amino acid modifications are made in one or more of the CDRs of the anti-PVRIG/anti-TIGIT bispecific antibodies of the invention (for example, to the PVRIG CDRs or the TIGIT CDRs). In general, only 1 or 2 or 3-amino acids are substituted in any single CDR, and generally no more than from 1, 2, 3. 4, 5, 6, 7, 8, 9, or 10 changes are made within a set of 6 CDRs (e.g., vhCDR1-3 and vlCDR1-3). However, it should be appreciated that any combination of no substitutions, 1, 2 or 3 substitutions in any CDR can be independently and optionally combined with any other substitution.

[0303] Affinity maturation can be done to increase the binding affinity of the antibody for the antigen by at least about 10% to 50-100-150% or more, or from 1 to 5 fold as compared to the “parent” antibody. In some embodiments, affinity matured antibodies will have nanomolar or even picomolar affinities for the antigen. Affinity matured antibodies are produced by known procedures. The correlation of affinity and efficacy is discussed below.

[0304] Alternatively, amino acid modifications can be made in one or more of the CDRs of the antibodies of the invention that are “silent”, e.g., that do not significantly alter the affinity of the antibody for the antigen. These can be made for a number of reasons, including optimizing expression (as can be done for the nucleic acids encoding the antibodies of the invention).

[0305] Thus, included within the definition of the CDRs and anti-PVRIG/anti-TIGIT bispecific antibodies of the invention are variant CDRs and anti-PVRIG/anti-TIGIT bispecific antibodies; that is, the anti-PVRIG/anti-TIGIT bispecific antibodies of the invention can include amino acid modifications in one or more of the CDRs of the enumerated antibodies of the invention. In addition, as outlined below, amino acid modifications can also independently and optionally be made in any region outside the CDRs, including framework and constant regions.

### VI. ANTI-PVRIG, ANTI-TIGIT, AND/OR ANTI-PVRIG/ANTI-TIGIT BISPECIFIC ANTIBODIES OF THE INVENTION

[0306] The present invention provides bispecific anti-PVRIG/anti-TIGIT antibodies, as well as anti-PVRIG and/or anti-TIGIT antibodies. (For convenience, “anti-PVRIG/anti-TIGIT antibodies” and “bispecific PVRIG/TIGIT antibodies” and “anti-PVRIG/anti-TIGIT bispecific antibodies” are used interchangeably). The anti-PVRIG/anti-TIGIT bispecific antibodies of the invention specifically bind to human TIGIT, and preferably the ECD of human TIGIT, as well as PVRIG, and again, preferably the ECD of human PVRIG. The invention further provides antigen binding domains, including full length antibodies, which contain a number of specific, enumerated sets of 12 CDRs, 6 CDRs that bind to TIGIT and 6 CDRs that bind to PVRIG.

[0307] The present invention also provides anti-PVRIG antibodies that can be in the context of a monospecific antibody or a bispecific antibody. Such antibodies include:

Antibody sequence for PVRIG
(IMGT CDR definition bold and underlined)
CHA.7.518.4 VH

(SEQ ID NO: 3179)

QVQLVQSGAEVKKPGASVKVSCKASGYTFTDYNINWVRQAPGQGLEW
MGYIYPYIGGSGYAQKFQGRVTMTRDTSTSTVYMELSSLRSEDTAVYY
CAREDKTARNAMDYWGQGTLVTVSS
CHA.7.518.4 VL

(SEQ ID NO: 3180)

DIQMTQSPSSLSASVGDRVTITCRVSENIYDVLAWYQQKPGKAPKLLIY
EATNLAEGVPSRFSGSGSGTDFTLTISSLQPEDFATYYCQHFWGTPYTF
GQGTKLEIK

[0308] The present invention also provides anti-TIGIT antibodies that can be in the context of a monospecific antibody or a bispecific antibody. Such antibodies include:

Antibody sequence for TIGIT
(IMGT CDR definition bold and underlined)
CHA.9.547.18 VH

(SEQ ID NO: 1664)

EVQLVESGGGLVQPGGSLRLSCAASGFTFSSYIMSWVRQAPGKGLEWV
ATISGGSKGQYYADSVKGRFTISRDNSKNTLYLQMNSLRAEDTAVYYC
AKWLLSYYAMDYWGQGTLVTVSS
CHA.9.547.18 VL

(SEQ ID NO: 1668)

DIQMTQSPSSLSASVGDRITITCRASQSMAIWLSWYQQKPGKAPKLLIY
KASKSHTGVPSRFSGSGSGTDFTLTISSLQPEDFATYYCQQGQSYPYT
FGQGTKLEIK

[0309] Specific binding for PVRIG and/or TIGIT or a PVRIG and/or TIGIT epitope can be exhibited, for example, by an antibody having a K_{D} of at least about 10⁻⁴ M, at least about 10⁻⁵ M, at least about 10⁻⁶ M, at least about 10⁻⁷ M, at least about 10⁻⁸ M, at least about 10⁻⁹M, alternatively at least about 10⁻¹⁰ M, at least about 10⁻¹¹ M, at least about 10⁻¹²M, at least about 10⁻¹³ M, at least about 10⁻¹⁴ M, at least about 10⁻¹⁵ M, or greater, where K_{D} refers to the equilibrium dissociation constant of a particular antibody-antigen interaction for each antigen independently. Typically, an antibody that specifically binds an antigen will have a K_{D} that is 20-, 50-, 100-, 500-, 1000-, 5,000-, 10,000- or more times greater for a control molecule relative to the TIGIT antigen or epitope.

[0310] However, for optimal binding to PVRIG and/or TIGIT expressed on the surface of NK and T-cells, the antibodies preferably have a KD less 50 nM and most preferably less than 1 nM, with less than 0.1 nM and less than 1 pM finding use in the methods of the invention

[0311] Also, specific binding for a particular antigen or an epitope can be exhibited, for example, by an antibody having a ka (referring to the association rate constant) for a PVRIG and/or a TIGIT antigen or epitope of at least 20-, 50-, 100-, 500-, 1000-, 5,000-, 10,000- or more times greater for the epitope relative to a control, where ka refers to the association rate constant of a particular antibody-antigen interaction.

[0312] In some embodiments, the anti-PVRIG/anti-TIGIT bispecific antibodies of the invention bind to human TIGIT and/or human PVRIG with a K_{D} of 100 nM or less, 50 nM or less, 10 nM or less, or 1 nM or less (that is, higher binding affinity), or 1 pM or less, wherein K_{D} is determined by known methods, e.g., surface plasmon resonance (SPR, e.g. Biacore assays), ELISA, KINEXA, and most typically SPR at 25° or 37° C.

[0313] A. Bispecific and/or Heterodimeric Antibodies

[0314] The present invention provides bispecific PVRIG and TIGIT checkpoint antibodies that rely on the use of two different heavy chain variant Fc sequences, which self-assemble to form Fc domains that are heterodimeric and antibodies that are heterodimeric antibodies (e.g., bispecific antibodies).

[0315] In some embodiments, the present invention provides anti-PVRIG/anti-TIGIT bispecific antibodies that allow for binding to both PVRIG and TIGIT. The antibody constructs described herein are based on the self-assembling and pairing of two Fc domains from two heavy chains (e.g., two Fc domains. two variable regions comprising the two Fc domains, and/or two heavy chains), to assembly into a dimer. In some embodiments, the amino acid sequences of each monomer are altered for to facilitate assembly of the monomers into dimers. In some embodiments, these amino acid variants and/or alterations are in the constant region. In some embodiments, the amino acid variants are different in each constant region in order to promote and/or facilitate heterodimeric assembly as compared to homodimeric assembly. Numerous methods and formats for bispecific antibodies are known in the art (see, for Example, Godar, et. al., Expert Opinion on Therapeutic Patents, 28(3):251-276 (2018) and Brinkmann and Kontermann, The making of bispecific antibodies, MAbs, 9(2): 182-212 (2017), both of which are incorporated by reference herein in their entireties).

[0316] As provided herein, the anti-PVRIG/anti-TIGIT bispecific heterodimeric antibodies of the invention include two antigen binding domains (ABDs), each of which bind to a different checkpoint protein, in particular PVRIG and TIGIT. These heterodimeric antibodies can be bispecific and bivalent (each antigen is bound by a single ABD, for example), or bispecific and trivalent (one antigen is bound by a single ABD and the other is bound by two ABDs). For all of the variable heavy and light domains listed herein, further variants can be made. In some embodiments, the anti-PVRIG/anti-TIGIT bispecific antibodies of the invention can comprise ABDs from any of the variable heavy and light domains and/or chains listed herein, such as for example in FIGS. 4A-4AA, 7A-7AE, 8A-8D, 11A-11I, 12A-12E, 15A15B, 16A-16E, 17A-17C, 23A-23D, 24A-24EE, 40A-40T, and 41A-41T. In some embodiments, the anti-PVRIG/anti-TIGIT bispecific antibodies of the invention can comprise CDRs from any of the variable heavy and light domains and/or chains listed herein, such as for example in FIGS. 4A-4AA, 7A-7AE, 8A-8D, 11A-11I, 12A-12E, 15A15B, 16A-16E, 17A-17C, 23A-23D, 24A-24EE, 40A-40T, and 41A-41T. As outlined herein, in some embodiments the set of 6 CDRs can have from 0, 1, 2, 3, 4 or 5 amino acid modifications (with amino acid substitutions finding particular use), as well as changes in the framework regions of the variable heavy and light domains, as long as the frameworks (excluding the CDRs) retain at least about 80, 85 or 90% identity to a human germline sequence. Thus, for example, the identical CDRs as described herein can be combined with different framework sequences from human germline sequences, as long as the framework regions retain at least 80, 85 or 90% identity to a human germline sequence. Alternatively, the CDRs can have amino acid modifications (e.g. from 1, 2, 3, 4 or 5 amino acid modifications in the set of CDRs (that is, the CDRs can be modified as long as the total number of changes in the set of 6 CDRs is less than 6 amino acid modifications, with any combination of CDRs being changed; e.g., there may be one change in vlCDR1, two in vhCDR2, none in vhCDR3, etc.), as well as having framework region changes, as long as the framework regions retain at least 80, 85 or 90% identity to a human germline sequence.

[0317] The present invention provides anti-PVRIG/anti-TIGIT bispecific antibodies. Bispecific antibodies are generally made by expressing genes for each heavy and light chain in the host cells. This generally results in the formation of the desired heterodimer (A-B), as well as the two homodimers (A-A and B-B (not including the light chain heterodimeric issues)).

[0318] In order to address the issues surrounding homodimeric and heterodimeric antibody formation (and the issues around separation of the two during purification), methods have been developed to bias self-assembly into the heterodimeric forms as opposed to the homodimeric forms. A number of mechanism and methods can be used to generate heterodimeric antibodies and in particular to generate heterodimers using the PVRIG and TIGIT antibody sequences of the present invention, including those FIGS. 4A-4AA, 7A-7AE, 8A-8D, 11A-11I, 12A-12E, 15A15B, 16A-16E, 17A-17C, 23A-23D, 24A-24EE, 40A-40T, and 41A-41T. In some embodiments, the anti-PVRIG/anti-TIGIT bispecific antibody comprise the sequences provided in FIGS. 26A-26B, 40A-40T, and 41A-41T (SEQ IN NOs:3213-3612). In some embodiments, mechanisms and methods are combined to ensure a high percentage of heterodimerization.

[0319] Variants that can promote heterodimerization variants (sometimes referred to as “heterodimerization variants) can include steric variants (e.g., the “knobs and holes” as provided as an example in FIGS. 25, 42, and 43, or “skew” variants described below and the “charge pairs” variants described below) as well as “pi variants”, which allow for purification of homodimers away from heterodimers. Such methods have been described in a variety of patent publications, including WO1996/027011 as well as WO2014/145806, hereby incorporated by reference in its entirety for the discussion of “heterodimerization variants”, useful mechanisms for heterodimerization including “knobs and holes” (“KIH”; sometimes herein as “skew” variants, “electrostatic steering” or “charge pairs” as described in WO2006/106905 or WO2014/145806, pi variants as described in WO 2007/114325 or WO2014/145806, as well as WO2017/218707, and WO2018045110; all of which are incorporated by reference herein in their entireties.

[0320] 1. Heterodimerization Variants

[0321] The present invention provides anti-PVRIG/anti-TIGIT bispecific antibodies antibodies in a variety of formats, which utilize heterodimeric variants to allow for heterodimeric formation and/or purification away from homodimers.

[0322] There are a number of suitable pairs of sets of heterodimerization skew variants. These variants come in “pairs” of “sets”. In some embodiments, one set of the pair is incorporated into the first monomer and the other set of the pair is incorporated into the second monomer. In some embodiments, these sets do not necessarily behave as “knobs in holes” variants, with a one-to-one correspondence between a residue on one monomer and a residue on the other, but rather these pairs of sets form an interface between the two monomers that encourages heterodimer formation and discourages homodimer formation, allowing the percentage of heterodimers that spontaneously form under biological conditions to be over 90%, rather than the expected 50% (25% homodimer A/A:50% heterodimer A/B:25% homodimer B/B). In some embodiments, the percentage of heterodimers formed is greater than 90%, greater than 91%, greater than 92%, greater than 93%, greater than 94%, greater than 95%, greater than 96%, greater than 97%, greater than 98%, or greater than 99%.

[0323] In some embodiments, the formation of heterodimers can be facilitated by the addition of steric variants. In some embodiments, by altering amino acids in each heavy chain, different heavy chains are more likely to associate to form the heterodimeric structure than to form homodimers with the same Fc amino acid sequences (e.g., to prevent HC/HC mispairing). Suitable steric variants are known in the art and discussed in further detail below.

[0324] In some embodiments, a mechanism referred to as “knobs and holes” or “knobs into holes”, referring to amino acid engineering that creates steric influences that promote heterodimeric formation and disfavor homodimeric formation can also optionally be used; this is sometimes referred to as “knobs and holes”, as described in Ridgway et al., Protein Engineering 9(7):617 (1996); Atwell et al, J. Mol. Biol. 1997 270:26; U.S. Pat. No. 8,216,805; and WO1996/027011, all of which are hereby incorporated by reference in their entirety. In some embodiments the “knobs” refers to a CH3 domain a variant, T366Y, and the “holes” refers to a CH3 domain b variant, Y407T. In some embodiments the “knobs” refers to a CH3 domain a variant, S354C/T366W, and the “holes” refers to a CH3 domain b variant, Y349C/T366S/L368A/Y407V. In addition, as described in Merchant et al, Nature Biotech. 16:677 (1998), these “knobs and holes” mutations can be combined with disulfide bonds to skew formation to heterodimerization. In some embodiments, the PVRIG binding portion comprises one set of substitutions from the pair and the TIGIT binding portion comprises the other set of substitutions from the pair. In some embodiments, the PVRIG binding portion comprises the “knobs” substitutions and the TIGIT binding portion comprises the “hole” substitutions from the pair. In some embodiments, the TIGIT binding portion comprises the “knobs” substitutions and the PVRIG binding portion comprises the “hole” substitutions from the pair. In some embodiments, the PVRIG binding portion comprises the substitutions S354C/T366W and the TIGIT binding portion comprises the substitutions Y349C/T366S/L368A/Y407V. In some embodiments, the PVRIG binding portion comprises the substitutions S354C/E356D/M358L/T366W and the TIGIT binding portion comprises the substitutions Y349C/E356D/M358L/T366S/L368A/Y407V.

[0325] In some embodiments, a mechanism referred to as “ART-Ig” (Asymmetric Re-engineering Technology-Immunoglobulin), referring to amino acid engineering that which introduces mutations to create electrostatic steering effects can also optionally be used; for example, these address LC/HC pairing (common LCs by framework/complementarity determining regions shuffling) and HC/HC mispairing problems solved by introducing mutations to create electrostatic steering effects. In some embodiments, the PVRIG binding portion comprises one set of substitutions from the pair and the TIGIT binding portion comprises the other set of substitutions from the pair. Such methods are described in Gunasekaran et al., J. Biol. Chem. 285(25): 19637 (2010); and WO2006/106905, hereby incorporated by reference in their entireties. This method is also sometimes referred to “charge pairs”. In some embodiments, electrostatics are used to skew the formation towards heterodimerization. These substitutions can also have an effect on pi, and thus on purification, and in some embodiments, could also be considered pi variants. In some embodiments, such substitutions are considered and/or referred to as “steric variants”. In some embodiments, these include IgG1 hinge/CH3 charge pairs (EEE-RRR) comprising the set of substitutions D221E/P228E/L368E, paired with D221R/P228R/K409R. In some embodiments, these include IgG2 hinge/CH3 charge pairs (EEE-RRRR) comprising the set of substitutions C223E/P228E/L368E paired with C223R/E225R/P228R/K409R. In some embodiments, these include CH3 charge pairs (DD-KK) K392D/K409D paired with E356K/D399K. In some embodiments, these include EW-RVT pairs, with K360E/K409W paired with Q347R/D399V/F405T. In some embodiments, these include EW-RVTS-S pairs, with K360E/K409W/Y349C paired with Q347R/D399V/F405T/S354C. In some embodiments, these include 366K (+351K) paired with 351D or E or D at 349, 368, 349, or 349+355. In some embodiments, these include DuoBody (L-R) pairs, with F405L paired with K409R. In some embodiments, these include SEEDbody pairs, with IgG/A chimera paired with an IgG/A chimera. In some embodiments, these include BEAT pairs, with residues from TCRα interface paired with residues from TCRβ interface. In some embodiments, these include BEAT pairs, with residues from TCRα interface in CH3 domain a paired with residues from TCRβ interface in CH3 domain b. In some embodiments, these include 7.8.60 (DMA-RRVV) pairs, with K360D/D399M/Y407A paired with E345R/Q347R/T366V/K409V. In some embodiments, these include 20.8.34 (SYMV-GDQA) pairs, with Y349S/K370Y/T366M/K409V paired with E356G/E357D/S364Q/Y407A. See, for example, Brinkmann and Kontermann, The making of bispecific antibodies, MAbs, 9(2): 182-212 (2017). In some embodiments, the PVRIG binding portion comprises one set of substitutions from the pair and the TIGIT binding portion comprises the other set of substitutions from the pair. See, for example, WO2012131555, and WO2011131746, incorporated by reference herein in their entireties.

[0326] In some embodiments, a mechanism referred to as CrossMAb can be employed to address LC/HC mispairing issues. In some embodiments, CrossMAb^{VH-VL} is employed to exchange the VH and VL domains. In some embodiments, CrossMAb^{CH1-CL} is employed to exchange the CH1 and CL domains. In some embodiments, CrossMAb^{Fab} is employed to exchange the VH-CH1 and VL-CL domains. In some embodiments, the anti-PVRIG/anti-TIGIT bispecific heterodimeric antibodies of the invention employs the CrossMAb^{CH1-CL} and the CH1 and CL domains are exchanged. In some embodiments, the anti-PVRIG/anti-TIGIT bispecific heterodimeric antibodies of the invention employs the CrossMAb^{VH-VL} and the VH and VL domains are exchanged. In some embodiments, the anti-PVRIG/anti-TIGIT bispecific heterodimeric antibodies of the invention employs the CrossMAb^{Fab} and the VH-CH1 and VL-CL domains are exchanged. See, for example, WO2009080251, incorporated by reference herein in its entirety.

[0327] In some embodiments, a mechanism referred to as BiMAb can be employed to address LC/HC and HC/HC mispairing issues and promote formation of the desired bispecific antibody. See, for example, WO2010129304, incorporated by reference herein in its entirety. In some embodiments, LC/HC and HC/HC mispairing problems can be solved by introducing mutations to create electrostatic steering effects, e.g., in a human IgG2. In some embodiments, these include BiMAb pairs, with CH3 domain a substitutions K249E/K288E paired with CH3 domain b substitutions E236K/D278K. In some embodiments, the PVRIG binding portion comprises one set of substitutions from the BiMAb pair and the TIGIT binding portion comprises the other set of substitutions from the BiMAb pair.

[0328] In some embodiments, a mechanism referred to as FcΔAdp can be employed to address LC/HC and HC/HC mispairing issues and promote formation of the desired bispecific antibody. See, for example, WO2010151792, incorporated by reference herein in its entirety. In some embodiments, LC/HC and HC/HC mispairing problems can be solved by introducing mutations to create differential protein A affinity. In some embodiments, these include FcΔAdp pairs, with CH3 domain a substitution H435R paired with no substitutions in the CH3 domain. In some embodiments, the PVRIG binding portion comprises one set of substitutions from the FcΔAdp pair and the TIGIT binding portion comprises the other set of substitutions from the FcΔAdp pair.

[0329] In some embodiments, a mechanism referred to as XmAb can be employed to address LC/HC (Fab-scFv-Fc) and HC/HC mispairing issues and promote formation of the desired bispecific antibody. See, for example, WO2011028952, incorporated by reference herein in its entirety. In some embodiments LC/HC (Fab-scFv-Fc) and HC/HC mispairing problems can be solved by introducing HA-TF substitutions. In some embodiments, the HA-TF pair includes CH3 domain a substitutions S364H/F405A with CH3 domain b substitutions Y349T/T394F. In some embodiments, the PVRIG binding portion comprises one set of substitutions from the XmAb pair and the TIGIT binding portion comprises the other set of substitutions from the XmAb pair.

[0330] In some embodiments, a mechanism referred to as DuoBody can be employed to address LC/HC (controlled Fab-arm exchanged) and HC/HC mispairing issues and promote formation of the desired bispecific antibody. See, for example, WO2011131746, incorporated by reference herein in its entirety. In some embodiments, LC/HC and HC/HC mispairing problems can be solved by introducing CH3 domain substitutions. In some embodiments, the DuoBody (L-R) pair includes a CH3 domain a substitution F405L paired with a CH3 domain b substitution K409R. In some embodiments, the PVRIG binding portion comprises one of the substitutions from the DuoBody pair and the TIGIT binding portion comprises the other substitution from the DuoBody pair.

[0331] In some embodiments, a mechanism referred to as Azymetric can be employed to address LC/HC (orthoFab-Ig) and HC/HC mispairing issues and promote formation of the desired bispecific antibody. See, for example, WO2012058768, incorporated by reference herein in its entirety. In some embodiments, mispairing problems can be solved by introducing ZW1 substitutions. In some embodiments, the ZW1 pair includes CH3 domain a substitutions T350V/L351Y/S400E/F405A/Y407V paired with CH3 domain b substitutions T350V/T366L/N390R/K392M/T394W. In some embodiments, the PVRIG binding portion comprises one of the substitutions from the ZW1 pair and the TIGIT binding portion comprises the other substitution from the ZW1 pair.

[0332] In some embodiments, a mechanism referred to as Biclonics can be employed to address LC/HC (common LCs generated by using the transgenic mouse MeMo and phage display libraries) and HC/HC mispairing mispairing issues and promote formation of the desired bispecific antibody. See, for example, WO2013157953, incorporated by reference herein in its entirety. In some embodiments, mispairing problems can be solved by introducing various substitutions. In some embodiments, the substitution pair includes CH3 domain a substitution T366K (+L351K) paired with CH3 domain b substitutions L351D/E or D at any one of Y349, L368, or Y349, and +R355. In some embodiments, the PVRIG binding portion comprises one of the substitutions from the Biclonics pair and the TIGIT binding portion comprises the other substitution from the Biclonics pair.

[0333] In some embodiments, the steric variants discussed herein can be optionally and independently incorporated with any pi or other variants such as Fc variants, FcRn variants, etc., into one or both monomers, and can be independently and optionally included or excluded from the anti-PVRIG/anti-TIGIT bispecific antibodies of the invention.

[0334] 2. Exemplary Bispecific Antibody Formats

[0335] As would be understood by those skilled in the art and discussed more fully below, the anti-TIGIT/anti-PVRIF bispecific heterodimeric antibodies of the present invention can occur in a variety of configurations, as provided in FIGS. 33 (asymmetric formats) and 34 (symmetric formats) (see, also, Brinkmann and Kontermann, The making of bispecific antibodies, MAbs, 9(2): 182-212 (2017); incorporated by reference herein). In some embodiments, the heterodimeric formats of the anti-TIGIT/anti-PVRIF bispecific antibodies of the invention can have different valencies as well as be bispecific. In some embodiments, the anti-TIGIT/anti-PVRIF bispecific heterodimeric antibodies of the invention can be bivalent and bispecific, wherein one checkpoint target (e.g., either PVRIG or TIGIT) is bound by one binding portion or antigen binding domain (ABD) and the other checkpoint target (e.g., either TIGIT or PVRIG) is bound by a second binding portion or antigen binding domain (ABD). In some embodiments, the anti-TIGIT/anti-PVRIF bispecific heterodimeric antibodies of the invention can also be trivalent and bispecific, wherein the first checkpoint target (e.g., either PVRIG or TIGIT) is bound by two binding portions or antigen binding domains (ABDs) and the second checkpoint target (e.g., either PVRIG or TIGIT) by a second binding portion or antigen binding domain (ABD).

[0336] In some embodiments, the format is any one of those provided, for example in FIGS. 33 and 34, as well as WO2015/149077A1 and WO2017/218707, incorporated by reference herein in its entirety. These formats can be combined with any of the above variants as well.

[0337] B. PVRIG Binding Portion of the Anti-PVRIG/Anti-TIGIT Bispecific Antibodies

[0338] Specific binding for PVRIG or a PVRIG epitope can be exhibited, for example, by an antibody having a KD of at least about 10⁻⁴M, at least about 10⁻⁵ M, at least about 10⁻⁶ M, at least about 10⁻⁷ M, at least about 10⁻⁸M, at least about 10⁻⁹M, alternatively at least about 10⁻¹⁰ M, at least about 10⁻¹¹ M, at least about 10⁻¹² M, or greater, where KD refers to a dissociation rate of a particular antibody-antigen interaction. Typically, an antibody that specifically binds an antigen will have a KD that is 20-, 50-, 100-, 500-, 1000-, 5,000-, 10,000- or more times greater for a control molecule relative to the PVRIG antigen or epitope.

[0339] Generally, for optimal binding to PVRIG expressed on the surface of NK and T-cells, the antibodies preferably have a KD less 50 nM and most preferably less than 1 nM, with less than 0.1 nM and less than 1 pM and 0.1 pM finding use in the methods of the invention.

[0340] Also, specific binding for a particular antigen or an epitope can be exhibited, for example, by an antibody having a KA or Ka for a PVRIG antigen or epitope of at least 20-, 50-, 100-, 500-, 1000-, 5,000-, 10,000- or more times greater for the epitope relative to a control, where KA or Ka refers to an association rate of a particular antibody-antigen interaction.

[0341] In some embodiments, the anti-PVRIG and/or anti-PVRIG/anti-TIGIT bispecific antibodies of the invention bind to human PVRIG with a K_{D} of 100 nM or less, 50 nM or less, 10 nM or less, or 1 nM or less (that is, higher binding affinity), or 1 pM or less, wherein K_{D} is determined by known methods, e.g. surface plasmon resonance (SPR, e.g. Biacore assays), ELISA, KINEXA, and most typically SPR at 25° or 37° C.

[0342] In some embodiments, binding affinity for the anti-PVRIG and/or anti-PVRIG/anti-TIGIT bispecific antibodies can be correlated with activity. Antibodies that exhibit the highest maximum signal on T cells can correlate with affinities in the picomolar range. In some embodiments, the anti-PVRIG/anti-TIGIT bispecific antibodies can be useful for T cell-based immunotherapy, which is based in part on their affinity. Reference is made to antibody sequences from WO2016/134333, hereby incorporated by reference and in particular for the anti-PVRIG antigen binding domains outlined in FIG. 38 (depicting sequences that bind PVRIG and block the interaction of PVRIG and PVRL2; include herein as FIG. 4A-4AA), FIG. 39 (depicting sequences that bind PVRIG and do not block the interaction of PVRIG and PVRL2; included herein as FIG. 5A-5H), FIG. 40A-40T (depicting CDRs and data from these antibodies; included herein as FIG. 6A-6G), and FIG. 41A-41T (depicting CDRs from hybridomas that bind and block; included herein as FIG. 7A-7AE), as well as FIG. 35A-35D providing additional PVRIG binding portions for use in the anti-PVRIG/anti-TIGIT bispecific antibodies. That is, the Figures and Legends as well as the particular sequences and SEQ ID NO:s from all CPA.7 and CHA.7 antibodies (including CDRs, VH and VL and full length sequences) from WO2016/134333 are expressly incorporated herein.

[0343] The anti-PVRIG and/or anti-PVRIG/anti-TIGIT bispecific antibodies of the invention have binding affinities (as measured using techniques outlined herein) in the picomolar range, e.g. from 0.1 to 9 pM, with from about 0.2 to about 2 being preferred, and from about 0.2 to about 0.5 being of particular use.

[0344] The PVRIG antibodies which can find use in providing the PVRIG binding portion of the anti-PVRIG/anti-TIGIT bispecific antibodies of the invention are labeled as follows. These PVRIG antibodies described herein are labeled as follows. The PVRIG antibodies have reference numbers, for example “CPA.7.013”. This represents the combination of the variable heavy and variable light chains, as depicted in FIG. 4A-4AA and FIGS. 5A-5H for example. “CPA.7.013.VH” refers to the variable heavy portion of CPA.7.013, while “CPA.7.013.VL” is the variable light chain. “CPA.7.013.vhCDR1”, “CPA.7.013.vhCDR2”, “CPA.7.013.vhCDR3”, “CPA.7.013.vlCDR1”, “CPA.7.013.vlCDR2”, and “CPA.7.013.vlCDR3”, refers to the CDRs are indicated. “CPA.7.013.HC” refers to the entire heavy chain (e.g. variable and constant domain) of this molecule, and “CPA.7.013.LC” refers to the entire light light chain (e.g. variable and constant domain) of the same molecule. “CPA.7.013.H1” refers to a full length antibody comprising the variable heavy and light domains, including the constant domain of Human IgG1 (hence, the H1; IgG1, IgG2, IgG3 and IgG4 sequences are shown in FIGS. 9A-9C and 21A-21B). Accordingly, “CPA.7.013.H2” would be the CPA.7.013 variable domains linked to a Human IgG2. “CPA.7.013.H3” would be the CPA.7.013 variable domains linked to a Human IgG3, and “CPA.7.013.H4” would be the CPA.7.013 variable domains linked to a Human IgG4. The anti-PVRIG/anti-TIGIT bispecific antibodies of the invention can comprise any of the PVRIG antibody sequences and/or PVRIG antigen binding domain sequences as the PVRIG binding portion of the anti-PVRIG/anti-TIGIT bispecific antibodies.

[0345] The PVRIG antibodies which can find use in providing the PVRIG binding portion of the anti-PVRIG/anti-TIGIT bispecific antibodies of the invention are labeled as follows. The antibodies have reference numbers, for example “CHA.7.518.1”. This represents the combination of the variable heavy and variable light chains, as depicted in FIG. 7A-7AE, for example, with the understanding that these antibodies include two heavy chains and two light chains. “CPA. 7.518.1.VH” refers to the variable heavy portion of CPA. 7.518.1, while “CPA.7.518.1.VL” is the variable light chain. “CPA. 7.518.1.vhCDR1”, “CPA.7.518.1.vhCDR2”, “CPA. 7.518.1.vhCDR3”, “CPA. 7.518.1.vlCDR1”, “CPA. 7.518.1.vlCDR2”, and “CPA. 7.518.1.vlCDR3”, refers to the CDRs are indicated. “CPA. 7.518.1.HC” refers to the entire heavy chain (e.g. variable and constant domain) of this molecule, and “CPA. 7.518.1.LC” refers to the entire light chain (e.g. variable and constant domain) of the same molecule. In general, the human kappa light chain is used for the constant domain of each phage (or humanized hybridoma) antibody herein, although in some embodiments the lambda light constant domain is used. “CPA. 7.518.1.H1” refers to a full-length antibody comprising the variable heavy and light domains, including the constant domain of Human IgG1 (hence, the H1; IgG1, IgG2, IgG3 and IgG4 sequences are shown in FIG. 21A-21B). Accordingly, “CPA. 7.518.1.H2” would be the CPA. 7.518.1 variable domains linked to a Human IgG2. “CPA. 7.518.1.H3” would be the CPA. 7.518.1 variable domains linked to a Human IgG3, and “CPA. 7.518.1.H4” would be the CPA. 7.518.1 variable domains linked to a Human IgG4. Note that in some cases, the human IgGs may have additional mutations, such are described below, and this can be annotated. For example, in many embodiments, there may be a S241P mutation in the human IgG4, and this can be annotated as “CPA. 7.518.1.H4(S241P)” for example. The human IgG4 sequence with this S241P hinge variant is shown in FIG. 21A-21B. Other potential variants are IgG1(N297A), (or other variants that ablate glycosylation at this site and thus many of the effector functions associated with FcγRIIIa binding), and IgG1(D265A), which reduces binding to FcγR receptors. The anti-PVRIG/anti-TIGIT bispecific antibodies of the invention can comprise any of the PVRIG antibody sequences as the PVRIG binding portion of the anti-PVRIG/anti-TIGIT bispecific antibodies. The anti-PVRIG/anti-TIGIT bispecific antibodies of the invention can comprise any of the PVRIG antigen binding domain sequences as the PVRIG binding portion of the anti-PVRIG/anti-TIGIT bispecific antibodies.

[0346] The invention further provides variable heavy and light domains as well as full length heavy and light chains, any of which can be employed as part of the PVRIG binding portion of the anti-PVRIG/anti-TIGIT bispecific antibodies.

[0347] In some embodiments, the invention provides scFvs that bind to PVRIG comprising a variable heavy domain and a variable light domain linked by an scFv linker as outlined above. The VL and VH domains can be in either orientation, e.g. from N- to C-terminus “VH-linker-VL” or “VL-linker”VH”. These are named by their component parts; for example, “scFv-CHA.7.518.1VH-linker-VL” or “scFv-CPA. 7.518.1.VL-linker-VH.” Thus, “scFv-CPA. 7.518.1” can be in either orientation. The anti-PVRIG/anti-TIGIT bispecific antibodies of the invention can comprise an scFv that binds to PVRIG as the PVRIG binding portion of the anti-PVRIG/anti-TIGIT bispecific antibodies.

[0348] The invention provides antigen binding domains, including full length antibodies, which contain a number of specific, enumerated sets of 6 CDRs. The anti-PVRIG/anti-TIGIT bispecific antibodies of the invention can comprise any of the sets of 6 CDRs from the PVRIG antibody sequences provided herein in the PVRIG binding portion of the anti-PVRIG/anti-TIGIT bispecific antibodies.

[0349] The invention further provides variable heavy and light domains as well as full length heavy and light chains.

[0350] In many embodiments, the anti-PVRIG/anti-TIGIT bispecific antibodies of the invention are human (derived from phage) and block binding of PVRIG and PVLR2. The anti-PVRIG/anti-TIGIT bispecific antibodies of the invention can comprise a PVRIG antibody and/or antigen binding domain sequence capable of both binding and blocking the receptor-ligand interaction as the PVRIG binding portion of the anti-PVRIG/anti-TIGIT bispecific antibodies. The anti-PVRIG/anti-TIGIT bispecific antibodies of the invention can comprise the CDRs from a PVRIG antibody sequence capable of both binding and blocking the receptor-ligand interaction as the PVRIG binding portion of the anti-PVRIG/anti-TIGIT bispecific antibodies. The CPA antibodies, as well as the CDR sequences, that both bind and block the receptor-ligand interaction are as below, with their components outlined as well, the sequences for which are shown in FIG. 4A-4AA:

[0351] CPA.7.001, CPA.7.001.VH, CPA.7.001.VL, CPA.7.001.HC, CPA.7.001.LC and CPA.7.001.H1, CPA.7.001.H2, CPA.7.001.H3, CPA.7.001.H4; CPA.7.001.vhCDR1, CPA.7.001.vhCDR2, CPA.7.001.vhCDR3, CPA.7.001.vlCDR1, CPA.7.001.vlCDR2, and CPA.7.001.vlCDR3;

[0352] CPA.7.003, CPA.7.003.VH, CPA.7.003.VL, CPA.7.003.HC, CPA.7.003.LC, CPA.7.003.H1, CPA.7.003.H2, CPA.7.003.H3, CPA.7.003.H4; CPA.7.003.vhCDR1, CPA.7.003.vhCDR2, CPA.7.003.vhCDR3, CPA.7.003.vlCDR1, CPA.7.003.vlCDR2, and CPA.7.003.vlCDR3;

[0353] CPA.7.004, CPA.7.004.VH, CPA.7.004.VL, CPA.7.004.HC, CPA.7.004.LC, CPA.7.004.H1, CPA.7.004.H2, CPA.7.004.H3 CPA.7.004.H4; CPA.7.004.vhCDR1, CPA.7.004.vhCDR2, CPA.7.004.vhCDR3, CPA.7.004.vlCDR1, CPA.7.004.vlCDR2, and CPA.7.004.vlCDR3;

[0354] CPA.7.006, CPA.7.006.VH, CPA.7.006.VL, CPA.7.006.HC, CPA.7.006.LC, CPA.7.006.H1, CPA.7.006.H2, CPA.7.006.H3 CPA.7.006.H4; CPA.7.006.vhCDR1, CPA.7.006.vhCDR2, CPA.7.006.vhCDR3, CPA.7.006.vlCDR1, CPA.7.006.vlCDR2, and CPA.7.006.vlCDR3;

[0355] CPA.7.008, CPA.7.008.VH, CPA.7.008.VL, CPA.7.008.HC, CPA.7.008.LC, CPA.7.008.H1, CPA.7.008.H2, CPA.7.008.H3 CPA.7.008.H4; CPA.7.008.vhCDR1, CPA.7.008.vhCDR2, CPA.7.008.vhCDR3, CPA.7.008.vlCDR1, CPA.7.008.vlCDR2, and CPA.7.008.vlCDR3;

[0356] CPA.7.009, CPA.7.009.VH, CPA.7.009.VL, CPA.7.009.HC, CPA.7.009.LC, CPA.7.009.H1, CPA.7.009.H2, CPA.7.009.H3 CPA.7.009.H4; CPA.7.009.vhCDR1, CPA.7.009.vhCDR2, CPA.7.009.vhCDR3, CPA.7.009.vlCDR1, CPA.7.009.vlCDR2, and CPA.7.009.vlCDR3;

[0357] CPA.7.010, CPA.7.010.VH, CPA.7.010.VL, CPA.7.010.HC, CPA.7.010.LC, CPA.7.010.H1, CPA.7.010.H2, CPA.7.010.H3 CPA.7.010.H4; CPA.7.010.vhCDR1, CPA.7.010.vhCDR2, CPA.7.010.vhCDR3, CPA.7.010.vlCDR1, CPA.7.010.vlCDR2, and CPA.7.010.vlCDR3;

[0358] CPA.7.011, CPA.7.011.VH, CPA.7.011.VL, CPA.7.011.HC, CPA.7.011.LC, CPA.7.011.H1, CPA.7.011.H2, CPA.7.011.H3 CPA.7.011.H4; CPA.7.011.vhCDR1, CPA.7.011.vhCDR2, CPA.7.011.vhCDR3, CPA.7.011.vlCDR1, CPA.7.011.vlCDR2, and CPA.7.011.vlCDR3;

[0359] CPA.7.012, CPA.7.012.VH, CPA.7.012.VL, CPA.7.012.HC, CPA.7.012.LC, CPA.7.012.H1, CPA.7.012.H2, CPA.7.012.H3 CPA.7.012.H4; CPA.7.012.vhCDR1, CPA.7.012.vhCDR2, CPA.7.012.vhCDR3, CPA.7.012.vlCDR1, CPA.7.012.vlCDR2, and CPA.7.012.vlCDR3;

[0360] CPA.7.013, CPA.7.013.VH, CPA.7.013.VL, CPA.7.013.HC, CPA.7.013.LC, CPA.7.013.H1, CPA.7.013.H2, CPA.7.013.H3 CPA.7.013.H4; CPA.7.013.vhCDR1, CPA.7.013.vhCDR2, CPA.7.013.vhCDR3, CPA.7.013.vlCDR1, CPA.7.013.vlCDR2, and CPA.7.013.vlCDR3;

[0361] CPA.7.014, CPA.7.014.VH, CPA.7.014.VL, CPA.7.014.HC, CPA.7.014.LC, CPA.7.014.H1, CPA.7.014.H2, CPA.7.014.H3 CPA.7.014.H4; CPA.7.014.vhCDR1, CPA.7.014.vhCDR2, CPA.7.014.vhCDR3, CPA.7.014.vlCDR1, CPA.7.014.vlCDR2, and CPA.7.014.vlCDR3;

[0362] CPA.7.015, CPA.7.015.VH, CPA.7.015.VL, CPA.7.015.HC, CPA.7.015.LC, CPA.7.015.H1, CPA.7.015.H2, CPA.7.015.H3 CPA.7.015.H4; CPA.7.015.vhCDR1, CPA.7.015.vhCDR2, CPA.7.015.vhCDR3, CPA.7.015.vlCDR1, CPA.7.015.vlCDR2, and CPA.7.015.vlCDR3;

[0363] CPA.7.017, CPA.7.017.VH, CPA.7.017.VL, CPA.7.017.HC, CPA.7.017.LC, CPA.7.017H1, CPA.7.017.H2, CPA.7.017.H3 CPA.7.017.H4; CPA.7.017.vhCDR1, CPA.7.000171.vhCDR2, CPA.7.017.vhCDR3, CPA.7.017.vlCDR1, CPA.7.017.vlCDR2, and CPA.7.017.vlCDR3;

[0364] CPA.7.018, CPA.7.018.VH, CPA.7.018.VL, CPA.7.018.HC, CPA.7.018.LC, CPA.7.018.H1, CPA.7.018.H2, CPA.7.018.H3 CPA.7.018.H4; CPA.7.017.vhCDR1, CPA.7.017.vhCDR2, CPA.7.017.vhCDR3, CPA.7.017.vlCDR1, CPA.7.017.vlCDR2, and CPA.7.017.vlCDR3;

[0365] CPA.7.019, CPA.7.019.VH, CPA.7.019.VL, CPA.7.019.HC, CPA.7.019.LC, CPA.7.019.H1, CPA.7.019.H2, CPA.7.019.H3 CPA.7.019.H4; CPA.7.019.vhCDR1, CPA.7.019.vhCDR2, CPA.7.019.vhCDR3, CPA.7.019.vlCDR1, CPA.7.019.vlCDR2, and CPA.7.019.vlCDR3;

[0366] CPA.7.021, CPA.7.021.VH, CPA.7.021.VL, CPA.7.021.HC, CPA.7.021.LC, CPA.7.021.H1, CPA.7.021.H2, CPA.7.021.H3 CPA.7.021.H4; CPA.7.021.vhCDR1, CPA.7.021.vhCDR2, CPA.7.021.vhCDR3, CPA.7.021.vlCDR1, CPA.7.021.vlCDR2, and CPA.7.021.vlCDR3;

[0367] CPA.7.022, CPA.7.022.VH, CPA.7.022.VL, CPA.7.022.HC, CPA.7.022.LC, CPA.7.022.H1, CPA.7.022.H2, CPA.7.022.H3 CPA.7.022.H4; CPA.7.022.vhCDR1, CPA.7.022.vhCDR2, CPA. 7.002201.vhCDR3, CPA.7.022.vlCDR1, CPA.7.022.vlCDR2, and CPA.7.022.vlCDR3;

[0368] CPA.7.023, CPA.7.023.VH, CPA.7.023.VL, CPA.7.023.HC, CPA.7.023.LC, CPA.7.023.H1, CPA.7.023.H2, CPA.7.023.H3 CPA.7.023.H4; CPA.7.023.vhCDR1, CPA.7.023.vhCDR2, CPA.7.023.vhCDR3, CPA.7.023.vlCDR1, CPA.7.023.vlCDR2, and CPA.7.023.vlCDR3;

[0369] CPA.7.024, CPA.7.024.VH, CPA.7.024.VL, CPA.7.024.HC, CPA.7.024.LC, CPA.7.024.H1, CPA.7.024.H2, CPA.7.024.H3 CPA.7.024.H4; CPA.7.024.vhCDR1, CPA.7.024.vhCDR2, CPA.7.024.vhCDR3, CPA.7.024.vlCDR1, CPA.7.024.vlCDR2, and CPA.7.024.vlCDR3;

[0370] CPA.7.033, CPA.7.033.VH, CPA.7.033.VL, CPA.7.033.HC, CPA.7.033.LC, CPA.7.033.H1, CPA.7.033.H2, CPA.7.033.H3 CPA.7.033.H4; CPA.7.033.vhCDR1, CPA.7.033.vhCDR2, CPA.7.033.vhCDR3, CPA.7.033.vlCDR1, CPA.7.033.vlCDR2, and CPA.7.033.vlCDR3;

[0371] CPA.7.034, CPA.7.034.VH, CPA.7.034.VL, CPA.7.034.HC, CPA.7.034.LC, CPA.7.034.H1, CPA.7.034.H2, CPA.7.034.H3 CPA.7.034.H4; CPA.7.034.vhCDR1, CPA.7.034.vhCDR2, CPA.7.034.vhCDR3, CPA.7.034.vlCDR1, CPA.7.034.vlCDR2, and CPA.7.034.vlCDR3;

[0372] CPA.7.036, CPA.7.036.VH, CPA.7.036.VL, CPA.7.036.HC, CPA.7.036.LC, CPA.7.036.H1, CPA.7.036.H2, CPA.7.036.H3 CPA.7.036.H4; CPA.7.036.vhCDR1, CPA.7.036.vhCDR2, CPA.7.036.vhCDR3, CPA.7.036.vlCDR1, CPA.7.036.vlCDR2, and CPA.7.036.vlCDR3;

[0373] CPA.7.040, CPA.7.040.VH, CPA.7.040.VL, CPA.7.040.HC, CPA.7.040.LC, CPA.7.040.H1, CPA.7.040.H2, CPA.7.040.H3 and CPA.7.040.H4; CPA.7.040.vhCDR1, CPA.7.040.vhCDR2, CPA.7.040.vhCDR3, CPA.7.040.vlCDR1, CPA.7.040.vlCDR2, and CPA.7.040.vlCDR3;

[0374] CPA.7.046, CPA.7.046.VH, CPA.7.046.VL, CPA.7.046.HC, CPA.7.046.LC, CPA.7.046.H1, CPA.7.046.H2, CPA.7.046.H3 CPA.7.046.H4; CPA.7.046.vhCDR1, CPA.7.046.vhCDR2, CPA.7.046.vhCDR3, CPA.7.046.vlCDR1, CPA.7.046.vlCDR2, and CPA.7.046.vlCDR3;

[0375] CPA.7.047, CPA.7.047.VH, CPA.7.047.VL, CPA.7.047.HC, CPA.7.047.LC, CPA.7.047.H1, CPA.7.047.H2, CPA.7.047.H3 CPA.7.047.H4; CPA.7.047.vhCDR1, CPA.7.047.vhCDR2, CPA.7.047.vhCDR3, CPA.7.047.vlCDR1, CPA. 7.004701.vlCDR2, and CPA.7.047.vlCDR3;

[0376] CPA.7.049, CPA.7.049.VH, CPA.7.049.VL, CPA.7.049.HC, CPA.7.049.LC, CPA.7.049.H1, CPA.7.049.H2, CPA.7.049.H3 CPA.7.049.H4; CPA.7.049.vhCDR1, CPA.7.049.vhCDR2, CPA.7.049.vhCDR3, CPA.7.049.vlCDR1, CPA.7.049.vlCDR2, and CPA.7.049.vlCDR3; and

[0377] CPA.7.050, CPA.7.050.VH, CPA.7.050.VL, CPA.7.050.HC, CPA.7.050.LC, CPA.7.050.H1, CPA.7.050.H2, CPA.7.050.H3 CPA.7.050.H4, CPA.7.050.vhCDR1, CPA.7.050.vhCDR2, CPA.7.050.vhCDR3, CPA.7.050.vlCDR1, CPA.7.050.vlCDR2, and CPA.7.050.vlCDR3.

[0378] In addition, there are a number of CPA antibodies generated herein that bound to PVRIG but did not block the interaction of PVRIG and PVLR2. The anti-PVRIG/anti-TIGIT bispecific antibodies of the invention can comprise a PVRIG antibody and/or antigen binding domain sequence capable of binding but not blocking the receptor-ligand interaction as the PVRIG binding portion of the anti-PVRIG/anti-TIGIT bispecific antibodies. The anti-PVRIG/anti-TIGIT bispecific antibodies of the invention can comprise the CDRs from a PVRIG antibody sequence capable of sequence capable of binding but not blocking the receptor-ligand interaction as the PVRIG binding portion of the anti-PVRIG/anti-TIGIT bispecific antibodies. The CPA antibodies, as well as the CDR sequences, that bind but do not block the receptor-ligand interaction are as below, with their components outlined as well, the sequences for which are shown in FIG. 4A-4AA:

[0379] CPA.7.028, CPA.7.028.VH, CPA.7.028.VL, CPA.7.028.HC, CPA.7.028.LC, CPA.7.028.H1, CPA.7.028.H2, CPA.7.028.H3 and CPA.7.028.H4; CPA.7.028.vhCDR1, CPA.7.028.vhCDR2, CPA.7.028.vhCDR3, CPA.7.028.vlCDR1, CPA.7.028.vlCDR2, and CPA.7.028.vlCDR3.

[0380] CPA.7.030, CPA.7.030.VH, CPA.7.030.VL, CPA.7.030.HC, CPA.7.030.LC, CPA.7.030.H1, CPA.7.030.H2, CPA.7.030.H3 and CPA.7.030.H4; CPA.7.030.vhCDR1, CPA.7.030.vhCDR2, CPA.7.030.vhCDR3, CPA.7.030.vlCDR1, CPA.7.030.vlCDR2, and CPA.7.030.vlCDR3.

[0381] CPA.7.041, CPA.7.041.VH, CPA.7.041.VL, CPA.7.041.HC, CPA.7.041.LC, CPA.7.041.H1, CPA.7.041.H2, CPA.7.041.H3 and CPA.7.041.H4; CPA.7.041.vhCDR1, CPA.7.041.vhCDR2, CPA.7.041.vhCDR3, CPA.7.041.vlCDR1, CPA.7.041.vlCDR2, and CPA.7.041.vlCDR3.

[0382] CPA.7.016, CPA.7.016.VH, CPA.7.016.VL, CPA.7.016.HC, CPA.7.016.LC, CPA.7.016.H1, CPA.7.016.H2, CPA.7.016.H3 and CPA.7.016.H4; CPA.7.016.vhCDR1, CPA.7.016.vhCDR2, CPA.7.016.vhCDR3, CPA.7.016.vlCDR1, CPA.7.016.vlCDR2, and CPA.7.016.vlCDR3.

[0383] CPA.7.020, CPA.7.020.VH, CPA.7.020.VL, CPA.7.020.HC, CPA.7.020.LC, CPA.7.020.H1, CPA.7.020.H2, CPA.7.020.H3 and CPA.7.020.H4; CPA.7.020.vhCDR1, CPA.7.020.vhCDR2, CPA.7.020.vhCDR3, CPA.7.020.vlCDR1, CPA.7.020.vlCDR2, and CPA.7.020.vlCDR3.

[0384] CPA.7.038, CPA.7.038.VH, CPA.7.038.VL, CPA.7.038.HC, CPA.7.038.LC, CPA.7.038.H1, CPA.7.038.H2, CPA.7.038.H3 and CPA.7.038.H4; CPA.7.038.vhCDR1, CPA.7.038.vhCDR2, CPA.7.038.vhCDR3, CPA.7.038.vlCDR1, CPA.7.038.vlCDR2, and CPA.7.038.vlCDR3.

[0385] CPA.7.044, CPA.7.044.VH, CPA.7.044.VL, CPA.7.044.HC, CPA.7.044.LC, CPA.7.044.H1, CPA.7.044.H2, CPA.7.044.H3 and CPA.7.044.H4; CPA.7.044.vhCDR1, CPA.7.044.vhCDR2, CPA.7.044.vhCDR3, CPA.7.044.vlCDR1, CPA.7.044.vlCDR2, and CPA.7.044.vlCDR3.

[0386] CPA.7.045, CPA.7.045.VH, CPA.7.045.VL, CPA.7.045.HC, CPA.7.045.LC, CPA.7.045.H1, CPA.7.045.H2, CPA.7.045.H3 and CPA.7.045.H4; CPA.7.045.vhCDR1, CPA.7.045.vhCDR2, CPA.7.045.vhCDR3, CPA.7.045.vlCDR1, CPA.7.045.vlCDR2, and CPA.7.045.vlCDR3.

[0387] As discussed herein, the invention further provides variants of the above components, including variants in the CDRs, as outlined above. In addition, variable heavy chains can be 80%, 90%, 95%, 98% or 99% identical to the “VH” sequences herein, and/or contain from 1, 2, 3, 4, 5, 6, 7, 8, 9, 10 amino acid changes, or more, when Fc variants are used. Variable light chains are provided that can be 80%, 90%, 95%, 98% or 99% identical to the “VL” sequences herein, and/or contain from 1, 2, 3, 4, 5, 6, 7, 8, 9, 10 amino acid changes, or more, when Fc variants are used. Similarly, heavy and light chains are provided that are 80%, 90%, 95%, 98% or 99% identical to the “HC” and “LC” sequences herein, and/or contain from 1, 2, 3, 4, 5, 6, 7, 8, 9, 10 amino acid changes, or more, when Fc variants are used. The anti-PVRIG/anti-TIGIT bispecific antibodies of the invention can comprise any of these PVRIG antibody and/or antigen bindgin domain sequences as the PVRIG binding portion of the anti-PVRIG/anti-TIGIT bispecific antibodies.

[0388] Furthermore, the present invention provides a number of CHA antibodies, which are murine antibodies generated from hybridomas. As is well known the art, the six CDRs are useful when put into either human framework variable heavy and variable light regions or when the variable heavy and light domains are humanized.

[0389] The anti-PVRIG and/or anti-PVRIG/anti-TIGIT bispecific antibodies of the invention can comprise any of the following CHA sets of CDRs from PVRIG antibody sequences as part of the PVRIG binding portion of the anti-PVRIG/anti-TIGIT bispecific antibodies of the invention. Accordingly, the present invention provides anti-PVRIG/anti-TIGIT bispecific antibodies, that comprise the following CHA sets of CDRs as part of the PVRIG binding portion of the anti-PVRIG/anti-TIGIT bispecific antibody, the sequences of which are shown in FIG. 7A-7AE:

[0390] CHA.7.502.vhCDR1, CHA.7.502.vhCDR2, CHA.7.502.vhCDR3, CHA.7.502.vlCDR1, CHA.7.502.vlCDR2, and CHA.7.502.vlCDR3.

[0391] CHA.7.503.vhCDR1, CHA.7.503.vhCDR2, CHA.7.503.vhCDR3, CHA.7.503.vlCDR1, CHA.7.503.vlCDR2, and CHA.7.503.vlCDR3.

[0392] CHA.7.506.vhCDR1, CHA.7.506.vhCDR2, CHA.7.506.vhCDR3, CHA.7.506.vlCDR1, CHA.7.506.vlCDR2, and CHA.7.506.vlCDR3.

[0393] CHA.7.508.vhCDR1, CHA.7.508.vhCDR2, CHA.7.508.vhCDR3, CHA.7.508.vlCDR1, CHA.7.508.vlCDR2, and CHA.7.508.vlCDR3.

[0394] CHA.7.510.vhCDR1, CHA.7.510.vhCDR2, CHA.7.510.vhCDR3, CHA.7.510.vlCDR1, CHA.7.510.vlCDR2, and CHA.7.510.vlCDR3.

[0395] CHA.7.512.vhCDR1, CHA.7.512.vhCDR2, CHA.7.512.vhCDR3, CHA.7.512.vlCDR1, CHA.7.512.vlCDR2, and CHA.7.512.vlCDR3.

[0396] CHA.7.514.vhCDR1, CHA.7.514.vhCDR2, CHA.7.514.vhCDR3, CHA.7.514.vlCDR1, CHA.7.514.vlCDR2, and CHA.7.514.vlCDR3.

[0397] CHA.7.516.vhCDR1, CHA.7.516.vhCDR2, CHA.7.516.vhCDR3, CHA.7.516.vlCDR1, CHA.7.516.vlCDR2, and CHA.7.516.vlCDR3.

[0398] CHA.7.518.vhCDR1, CHA.7.518.vhCDR2, CHA.7.518.vhCDR3, CHA.7.518.vlCDR1, CHA.7.518.vlCDR2, and CHA.7.518.vlCDR3.

[0399] CHA.7.520_1.vhCDR1, CHA.7.520_1.vhCDR2, CHA.7.520_1.vhCDR3, CHA.7.520_1.vlCDR1, CHA.7.520_1.vlCDR2, and CHA.7.520_1.vlCDR3.

[0400] CHA.7.520_2.vhCDR1, CHA.7.520_2.vhCDR2, CHA.7.520_2.vhCDR3, CHA.7.520_2.vlCDR1, CHA.7.520_2.vlCDR2, and CHA.7.520_2.vlCDR3.

[0401] CHA.7.522.vhCDR1, CHA.7.522.vhCDR2, CHA.7.522.vhCDR3, CHA.7.522.vlCDR1, CHA.7.522.vlCDR2, and CHA.7.522.vlCDR3.

[0402] CHA.7.524.vhCDR1, CHA.7.524.vhCDR2, CHA.7.524.vhCDR3, CHA.7.524.vlCDR1, CHA.7.524.vlCDR2, and CHA.7.524.vlCDR3.

[0403] CHA.7.526.vhCDR1, CHA.7.526.vhCDR2, CHA.7.526.vhCDR3, CHA.7.526.vlCDR1, CHA.7.526.vlCDR2, and CHA.7.526.vlCDR3.

[0404] CHA.7.527.vhCDR1, CHA.7.527.vhCDR2, CHA.7.527.vhCDR3, CHA.7.527.vlCDR1, CHA.7.527.vlCDR2, and CHA.7.527.vlCDR3.

[0405] CHA.7.528.vhCDR1, CHA.7.528.vhCDR2, CHA.7.528.vhCDR3, CHA.7.528.vlCDR1, CHA.7.528.vlCDR2, and CHA.7.528.vlCDR3.

[0406] CHA.7.530.vhCDR1, CHA.7.530.vhCDR2, CHA.7.530.vhCDR3, CHA.7.530.vlCDR1, CHA.7.530.vlCDR2, and CHA.7.530.vlCDR3.

[0407] CHA.7.534.vhCDR1, CHA.7.534.vhCDR2, CHA.7.534.vhCDR3, CHA.7.534.vlCDR1, CHA.7.534.vlCDR2, and CHA.7.534.vlCDR3.

[0408] CHA.7.535.vhCDR1, CHA.7.535.vhCDR2, CHA.7.535.vhCDR3, CHA.7.535.vlCDR1, CHA.7.535.vlCDR2, and CHA.7.535.vlCDR3.

[0409] CHA.7.537.vhCDR1, CHA.7.537.vhCDR2, CHA.7.537.vhCDR3, CHA.7.537.vlCDR1, CHA.7.537.vlCDR2, and CHA.7.537.vlCDR3.

[0410] CHA.7.538_1.vhCDR1, CHA.7.538_1.vhCDR2, CHA.7.538_1.vhCDR3, CHA.7.538_1.vlCDR1, CHA.7.538_1.vlCDR2, and CHA.7.538_1.vlCDR3.

[0411] CHA.7.538_2.vhCDR1, CHA.7.538_2.vhCDR2, CHA.7.538_2.vhCDR3, CHA.7.538_2.vlCDR1, CHA.7.538_2.vlCDR2, and CHA.7.538_2.vlCDR3.

[0412] CHA.7.543.vhCDR1, CHA.7.543.vhCDR2, CHA.7.543.vhCDR3, CHA.7.543.vlCDR1, CHA.7.543.vlCDR2, and CHA.7.543.vlCDR3.

[0413] CHA.7.544.vhCDR1, CHA.7.544.vhCDR2, CHA.7.544.vhCDR3, CHA.7.544.vlCDR1, CHA.7.544.vlCDR2, and CHA.7.544.vlCDR3.

[0414] CHA.7.545.vhCDR1, CHA.7.545.vhCDR2, CHA.7.545.vhCDR3, CHA.7.545.vlCDR1, CHA.7.545.vlCDR2, and CHA.7.545.vlCDR3.

[0415] CHA.7.546.vhCDR1, CHA.7.546.vhCDR2, CHA.7.546.vhCDR3, CHA.7.546.vlCDR1, CHA.7.546.vlCDR2, and CHA.7.546.vlCDR3.

[0416] CHA.7.547.vhCDR1, CHA.7.547.vhCDR2, CHA.7.547.vhCDR3, CHA.7.547.vlCDR1, CHA.7.547.vlCDR2, and CHA.7.547.vlCDR3.

[0417] CHA.7.548.vhCDR1, CHA.7.548.vhCDR2, CHA.7.548.vhCDR3, CHA.7.548.vlCDR1, CHA.7.548.vlCDR2, and CHA.7.548.vlCDR3.

[0418] CHA.7.549.vhCDR1, CHA.7.549.vhCDR2, CHA.7.549.vhCDR3, CHA.7.549.vlCDR1, CHA.7.549.vlCDR2, and CHA.7.549.vlCDR3.

[0419] CHA.7.550.vhCDR1, CHA.7.550.vhCDR2, CHA.7.550.vhCDR3, CHA.7.550.vlCDR1, CHA.7.550.vlCDR2, and CHA.7.550.vlCDR3.

[0420] CHA.7.518.4.vhCDR1, CHA.7.518.4.vhCDR2, CHA.7.518.4.vhCDR3, CHA.7.518.4.vlCDR1, CHA.7.518.4.vlCDR2, and CHA.7.518.4.vlCDR3.

[0421] As above, these sets of CDRs may also be amino acid variants as described above.

[0422] In addition, the framework regions of the variable heavy and variable light chains can be humanized as is known in the art (with occasional variants generated in the CDRs as needed), and thus humanized variants of the VH and VL chains of FIGS. 7A-7DD can be generated. Furthermore, the humanized variable heavy and light domains can then be fused with human constant regions, such as the constant regions from IgG1, IgG2, IgG3 and IgG4.

[0423] In particular, as is known in the art, murine VH and VL chains can be humanized as is known in the art, for example, using the IgBLAST program of the NCBI website, as outlined in Ye et al. Nucleic Acids Res. 41:W34-W40 (2013), herein incorporated by reference in its entirety for the humanization methods. IgBLAST takes a murine VH and/or VL sequence and compares it to a library of known human germline sequences. As shown herein, for the humanized sequences generated herein, the databases used were IMGT human VH genes (F+ORF, 273 germline sequences) and IMGT human VL kappa genes (F+ORF, 74 germline sequences). An exemplary five CHA sequences were chosen: CHA.7.518, CHA.7.530, CHA.7.538_1, CHA.7.538_2 and CHA.7.524 (see FIGS. 7A-7DD for the VH and VL sequences). For this embodiment of the humanization, human germline IGHV1-46(allele1) was chosen for all 5 as the acceptor sequence and the human heavy chain IGHJ4(allele1) joining region (J gene). For three of four (CHA.7.518, CHA.7.530, CHA.7.538_1 and CHA.7.538_2), human germline IGKV1-39(allele 1) was chosen as the acceptor sequence and human light chain IGKJ2(allele1) (J gene) was chosen. The J gene was chosen from human joining region sequences compiled at IMGT® the international ImMunoGeneTics information system as www.imgt.org. CDRs were defined according to the AbM definition (see www.bioinfo.org.uk/abs/). FIG. 11A-11I depict humanized sequences as well as some potential changes to optimize binding to PVRIG. The anti-PVRIG/anti-TIGIT bispecific antibodies of the invention can comprise any of these humanized PVRIG antibody or antigen binding domain sequences as the PVRIG binding portion of the anti-PVRIG/anti-TIGIT bispecific antibodies. The anti-PVRIG/anti-TIGIT bispecific antibodies of the invention can comprise CHA.7.518 PVRIG antibody sequences as the PVRIG binding portion of the anti-PVRIG/anti-TIGIT bispecific antibodies. The anti-PVRIG/anti-TIGIT bispecific antibodies of the invention can comprise CHA.7.530 PVRIG antibody sequences as the PVRIG binding portion of the anti-PVRIG/anti-TIGIT bispecific antibodies. The anti-PVRIG/anti-TIGIT bispecific antibodies of the invention can comprise CHA.7.538_1 PVRIG antibody sequences as the PVRIG binding portion of the anti-PVRIG/anti-TIGIT bispecific antibodies. The anti-PVRIG/anti-TIGIT bispecific antibodies of the invention can comprise CHA.7.538_2 PVRIG antibody sequences as the PVRIG binding portion of the anti-PVRIG/anti-TIGIT bispecific antibodies. The anti-PVRIG/anti-TIGIT bispecific antibodies of the invention can comprise CHA.7.518.4 PVRIG antibody sequences as the PVRIG binding portion of the anti-PVRIG/anti-TIGIT bispecific antibodies

[0424] Specific humanized antibodies of CHA antibodies include those shown in FIGS. 11A-11I, FIGS. 12A-12E and FIG. 13. The anti-PVRIG/anti-TIGIT bispecific antibodies of the invention can comprise CHA PVRIG antibody sequences as shown in FIGS. 11A-11I, FIGS. 12A-12E and FIG. 13 as the PVRIG binding portion of the anti-PVRIG/anti-TIGIT bispecific antibodies. As will be appreciated by those in the art, each humanized variable heavy (Humanized Heavy; HH) and variable light (Humanized Light, HL) sequence can be combined with the constant regions of human IgG1, IgG2, IgG3 and IgG4. That is, CHA.7.518.HH1 is the first humanized variable heavy chain, and CHA.7.518.HH1.1 is the full length heavy chain, comprising the “HH1” humanized sequence with a IgG1 constant region (CHA.7.518.HH1.2 is CHA.7.518.HH1 with IgG2, etc.). In some embodiments, anti-PVRIG/anti-TIGIT bispecific antibody comprises the PVRIG sequences provided in FIGS. 4A-4AA, 5A-5H, 7A-7AE, 11A-11I, 12A-12E, 13, 14A-14BX, 15A-15B, 16A-16E, 17A-17C, 26A-26B, and/or 40A-40T as the PVRIG binding portion.

[0425] In some embodiments, the anti-PVRIG antibodies of the present invention include anti-PVRIG antibodies wherein the V_{H} and V_{L} sequences of different anti-PVRIG antibodies can be “mixed and matched” to create other anti-PVRIG antibodies. PVRIG binding of such “mixed and matched” antibodies can be tested using the binding assays described above. e.g., ELISAs). In some embodiments, when V_{H} and V_{L} chains are mixed and matched, a V_{H} sequence from a particular V_{H}/V_{L} pairing is replaced with a structurally similar V_{H} sequence. Likewise, in some embodiments, a V_{L} sequence from a particular V_{H}/V_{L} pairing is replaced with a structurally similar V_{L} sequence. For example, the V_{H} and V_{L} sequences of homologous antibodies are particularly amenable for mixing and matching. The anti-PVRIG/anti-TIGIT bispecific antibodies of the invention can comprise PVRIG V_{H} and V_{L} sequences from different anti-PVRIG antibodies that have been “mixed and matched” as the PVRIG binding portion of the anti-PVRIG/anti-TIGIT bispecific antibodies.

[0426] Accordingly, the antibodies of the invention comprise CDR amino acid sequences selected from the group consisting of (a) sequences as listed herein; (b) sequences that differ from those CDR amino acid sequences specified in (a) by 1, 2, 3, 4, 5, 6, 7, 8, 9, 10 or more amino acid substitutions; (c) amino acid sequences having 90% or greater, 95% or greater, 98% or greater, or 99% or greater sequence identity to the sequences specified in (a) or (b); (d) a polypeptide having an amino acid sequence encoded by a polynucleotide having a nucleic acid sequence encoding the amino acids as listed herein. The anti-PVRIG/anti-TIGIT bispecific antibodies of the invention can comprise PVRIG variant CDR sequences as part of the PVRIG binding portion of the anti-PVRIG/anti-TIGIT bispecific antibodies.

[0427] Additionally included in the definition of PVRIG antibodies are antibodies that share identity to the PVRIG antibodies enumerated herein. That is, in certain embodiments, an anti-PVRIG antibody according to the invention comprises heavy and light chain variable regions comprising amino acid sequences that are homologous to isolated anti-PVRIG amino acid sequences of preferred anti-PVRIG immune molecules, respectively, wherein the antibodies retain the desired functional properties of the parent anti-PVRIG antibodies. The percent identity between the two sequences is a function of the number of identical positions shared by the sequences (e.g., % homology=# of identical positions/total # of positions X 100), taking into account the number of gaps, and the length of each gap, which need to be introduced for optimal alignment of the two sequences. The comparison of sequences and determination of percent identity between two sequences can be accomplished using a mathematical algorithm, as described in the non-limiting examples below. The anti-PVRIG/anti-TIGIT bispecific antibodies of the invention can comprise heavy and light chain variable regions comprising amino acid sequences that are homologous to isolated anti-PVRIG amino acid sequences as described herein.

[0428] The percent identity between two amino acid sequences can be determined using the algorithm of E. Meyers and W. Miller (Comput. Appl. Biosci., 4:11-17 (1988)) which has been incorporated into the ALIGN program (version 2.0), using a PAM120 weight residue table, a gap length penalty of 12 and a gap penalty of 4. In addition, the percent identity between two amino acid sequences can be determined using the Needleman and Wunsch (J. Mol. Biol. 48:444-453 (1970)) algorithm which has been incorporated into the GAP program in the GCG software package (available commercially), using either a Blossum 62 matrix or a PAM250 matrix, and a gap weight of 16, 14, 12, 10, 8, 6, or 4 and a length weight of 1, 2, 3, 4, 5, or 6.

[0429] Additionally or alternatively, the protein sequences of the present invention can further be used as a “query sequence” to perform a search against public databases to, for example, identify related sequences. Such searches can be performed using the XBLAST program (version 2.0) of Altschul, et al. (1990) J Mol. Biol. 215:403-10. BLAST protein searches can be performed with the XBLAST program, score=50, wordlength=3 to obtain amino acid sequences homologous to the antibody molecules according to at least some embodiments of the invention. To obtain gapped alignments for comparison purposes, Gapped BLAST can be utilized as described in Altschul et al., (1997) Nucleic Acids Res. 25(17):3389-3402. When utilizing BLAST and Gapped BLAST programs, the default parameters of the respective programs (e.g., XBLAST and NBLAST) can be used.

[0430] In general, the percentage identity for comparison between PVRIG antibodies is at least 75%, at least 80%, at least 90%, with at least about 95%, 96%, 97%, 98%, or 99% percent identity being preferred. The percentage identity may be along the whole amino acid sequence, for example the entire heavy or light chain or along a portion of the chains. For example, included within the definition of the anti-PVRIG antibodies of the invention are those that share identity along the entire variable region (for example, where the identity is 95% or 98% identical along the variable regions), or along the entire constant region, or along just the Fc domain. In particular, the invention provides anti-PVRIG/anti-TIGIT bispecific antibodies that have PVRIG binding portions or antigen binding domains with at least 75%, at least 80%, at least 90%, with at least about 95%, 96%, 97%, 98%, or 99% percent identity being preferred, with the CHA.7.518.4 antibody.

[0431] In addition, also included are sequences that may have the identical CDRs but changes in the variable domain (or entire heavy or light chain). For example, PVRIG antibodies include those with CDRs identical to those shown in FIGS. 8A-8D but whose identity along the variable region can be lower, for example 95 or 98% percent identical. In particular, the invention provides anti-PVRIG/anti-TIGIT bispecific antibodies that have PVRIG binding portions or antigen binding domains with identical CDRs to CHA.7.518.4 but with framework regions that are 95% or 98% identical to CHA.7.518.4.

[0432] The anti-PVRIG/anti-TIGIT bispecific antibodies of the invention can comprise CDRs identical to those shown in FIGS. 8A-8D as part of the PVRIG binding portion of the anti-PVRIG/anti-TIGIT bispecific antibodies.

[0433] In addition, also included are sequences that may have the identical CDRs but changes in the variable domain (or entire heavy or light chain). For example, PVRIG antibodies include those with CDRs identical to those shown in FIGS. 35A-35D but whose identity along the variable region can be lower, for example 95 or 98% percent identical.

[0434] The anti-PVRIG/anti-TIGIT bispecific antibodies of the invention can comprise CDRs identical to those shown in FIGS. 35A-35D as part of the PVRIG binding portion of the anti-PVRIG/anti-TIGIT bispecific antibodies.

[0435] In some embodiments, the PVRIG binding portion is from an anti-PVRIG antibody as provided in WO 2017/041004 (incorporated herein by reference in its entirety). In some embodiments, the PVRIG binding portion is from an anti-PVRIG antibody as provided in WO 2018/017864 (incorporated herein by reference in its entirety).

[0436] 1. PVRIG Antibodies that Compete for Binding with Enumerated Antibodies

[0437] The present invention provides not only the enumerated antibodies but additional antibodies that compete with the enumerated antibodies (the CPA and CHA numbers enumerated herein that specifically bind to PVRIG) to specifically bind to the PVRIG molecule. The PVRIG antibodies of the invention “bin” into different epitope bins. There are four separate bins outlined herein; 1) the epitope bin into which CPA.7.002, CPA.7.003, CPA.7.005, CPA.7.007, CPA.7.010, CPA.7.012, CPA.7.015, CPA.7.016, CPA.7.017, CPA.7.019, CPA.7.020, CPA.7.021, CPA.7.024, CPA.7.028, CPA.7.032, CPA.7.033, CPA.7.036, CPA.7.037, CPA.7.038, CPA.7.043, CPA.7.046 and CPA.7.041 all fall into; 2) the epitope bin into which CPA.7.004, CPA.7.009, CPA.7.011, CPA.7.014, CPA.7.018, CPA.7.022, CPA.7.023, CPA.7.034, CPA.7.040, CPA.7.045 and CPA.7.047 all fall into; 3) CPA.7.039, which defines the distinction between bin 1 and bin 2, in that bin 1 blocks CPA.7.039 binding and bin 2 sandwiches the ligand with CPA.7.039, and bin 4) with CPA.7.050. The anti-PVRIG/anti-TIGIT bispecific antibodies of the invention can comprise PVRIG antibodies and/or antigen binding domains sequences that are capable of competing with the enumerated antibodies (the CPA and CHA numbers enumerated herein that specifically bind to PVRIG) as part of the PVRIG binding portion of the anti-PVRIG/anti-TIGIT bispecific antibodies.

[0438] Thus, the invention provides anti-PVRIG/anti-TIGIT bispecific antibodies, where the PVRIG binding portion of the anti-PVRIG/anti-TIGIT bispecific antibodies is capable of competing for binding with antibodies that are in bin 1, with antibodies that are in bin 2, with antibodies that are in bin 3 and/or with antibodies that are in bin 4.

[0439] Additional anti-PVRIG/anti-TIGIT bispecific antibodies that compete with the enumerated antibodies are generated, as is known in the art and generally outlined below. Competitive binding studies can be done as is known in the art, generally using SPR/Biacore® binding assays, as well as ELISA and cell-based assays.

[0440] C. TIGIT Binding Portion of the Anti-PVRIG/Anti-TIGIT Bispecific Antibodies

[0441] The anti-TIGIT and/or anti-PVRIG/anti-TIGIT bispecific antibodies described herein can comprise a TIGIT antibody and/or antigen binding domain sequence as part of the TIGIT binding portion, where the TIGIT antibodies are labeled as follows. Such TIGIT antibodies have reference numbers, for example “CPA.9.086”. This represents the combination of the variable heavy and variable light chains, as depicted in FIG. 23A-23D, for example, with the understanding that these antibodies include two heavy chains and two light chains. “CPA.9.086.VH” refers to the variable heavy portion of CPA.9.086, while “CPA.9.086.VL” is the variable light chain. “CPA.9.086.vhCDR1”, “CPA.9.086.vhCDR2”, “CPA.9.086.vhCDR3”, “CPA.9.086.vlCDR1”, “CPA.9.086.vlCDR2”, and “CPA.9.086.vlCDR3”, refers to the CDRs are indicated. “CPA.9.086.HC” refers to the entire heavy chain (e.g. variable and constant domain) of this molecule, and “CPA.9.086.LC” refers to the entire light chain (e.g. variable and constant domain) of the same molecule. In general, the human kappa light chain is used for the constant domain of each phage (or humanized hybridoma) antibody herein, although in some embodiments the lambda light constant domain is used. “CPA.9.086.H1” refers to a full length antibody comprising the variable heavy and light domains, including the constant domain of Human IgG1 (hence, the H1; IgG1, IgG2, IgG3 and IgG4 sequences are shown in FIGS. 9A-9C and 21A-21B). Accordingly, “CPA.9.086.H2” would be the CPA.9.086 variable domains linked to a Human IgG2. “CPA.9.086.H3” would be the CPA.9.086 variable domains linked to a Human IgG3, and “CPA.9.086.H4” would be the CPA.9.086 variable domains linked to a Human IgG4. Note that in some cases, the human IgGs may have additional mutations, such are described below, and this can be annotated. For example, in many embodiments, there may be a S241P mutation in the human IgG4, and this can be annotated as “CPA. 9.086.H4(S241P)” for example. The human IgG4 sequence with this S241P hinge variant is shown in FIG. 21A-21B. Other potential variants are IgG1(N297A), (or other variants that ablate glycosylation at this site and thus many of the effector functions associated with FcγRIIIa binding), and IgG1(D265A), which reduces binding to FcγR receptors. The anti-TIGIT and/or anti-PVRIG/anti-TIGIT bispecific antibodies of the invention can comprise any of the TIGIT antibody domain sequences as the TIGIT binding portion of the anti-TIGIT and/or anti-PVRIG/anti-TIGIT bispecific antibodies. The anti-TIGIT and/or anti-PVRIG/anti-TIGIT bispecific antibodies of the invention can comprise any of the TIGIT antigen binding domains as the TIGIT binding portion of the anti-TIGIT and/or anti-PVRIG/anti-TIGIT bispecific antibodies.

[0442] The invention further provides variable heavy and light domains as well as full length heavy and light chains.

[0443] In some embodiments, the invention provides scFvs that bind to TIGIT comprising a variable heavy domain and a variable light domain linked by an scFv linker as outlined above. The VL and VH domains can be in either orientation, e.g. from N- to C-terminus “VH-linker-VL” or “VL-linker” VH″. These are named by their component parts; for example, “scFv-CPA. 9.086.VH-linker-VL” or “scFv-CPA.9.086.VL-linker-VH.” Thus, “scFv-CPA.9.086” can be in either orientation. The anti-PVRIG/anti-TIGIT bispecific antibodies of the invention can comprise any scFvs that bind to TIGIT as part of the TIGIT binding portion of the anti-PVRIG/anti-TIGIT bispecific antibodies. The anti-PVRIG/anti-TIGIT bispecific antibodies of the invention can comprise any scFvs that bind to TIGIT as part of the TIGIT antigen binding domain of the anti-PVRIG/anti-TIGIT bispecific antibodies. In some embodiments, anti-PVRIG/anti-TIGIT bispecific antibody comprises the PVRIG sequences provided in FIG. 26A-26B as the PVRIG binding portion. In many embodiments, the antibodies of the invention are human (derived from phage) and block binding of TIGIT and PVR. As shown in FIGS. 3 and 4A-4AA, the CPA antibodies that both bind and block the receptor-ligand interaction are as below, with their components outlined as well (as discussed in the “Sequence” section, the sequences of all but the scFv constructs are in the sequence listing as well as provided in FIG. 24A-24EE):

[0444] CPA.9.018, CPA.9.018.VH, CPA.9.018.VL, CPA.9.018.HC, CPA.9.018.LC, CPA.9.018.H1, CPA.9.018.H2, CPA.9.018.H3, CPA.9.018.H4; CPA.9.018.H4(S241P); CPA.9.018.vhCDR1, CPA.9.018.vhCDR2, CPA.9.018.vhCDR3, CPA.9.018.vlCDR1, CPA.9.018.vlCDR2, CPA.9.018.vlCDR3 and scFv-CPA.9.018;

[0445] CPA.9.027, CPA.9.027.VH, CPA.9.027.VL, CPA.9.027.HC, CPA.9.027.LC, CPA.9.027.H1, CPA.9.027.H2, CPA.9.027.H3, CPA.9.027.H4; CPA.9.018.H4(S241P); CPA.9.027.vhCDR1, CPA.9.027.vhCDR2, CPA.9.027.vhCDR3, CPA.9.027.vlCDR1, CPA.9.027.vlCDR2, CPA.9.027.vlCDR3 and scFv-CPA.9.027;

[0446] CPA.9.049, CPA.9.049.VH, CPA.9.049.VL, CPA.9.049.HC, CPA.9.049.LC, CPA.9.049.H1, CPA.9.049.H2, CPA.9.049.H3; CPA.9.049.H4; CPA.9.049.H4(S241P); CPA.9.049.vhCDR1, CPA.9.049.vhCDR2, CPA.9.049.vhCDR3, CPA.9.049.vlCDR1, CPA.9.049.vlCDR2, CPA.9.049.vlCDR3 and scFv-CPA.9.049;

[0447] CPA.9.057, CPA.9.057.VH, CPA.9.057.VL, CPA.9.057.HC, CPA.9.057.LC, CPA.9.057.H1, CPA.9.057.H2, CPA.9.057.H3; CPA.9.057.H4; CPA.9.057.H4(S241P); CPA.9.057.vhCDR1, CPA.9.057.vhCDR2, CPA.9.057.vhCDR3, CPA.9.057.vlCDR1, CPA.9.057.vlCDR2, CPA.9.057.vlCDR3 and scFv-CPA.9.057;

[0448] CPA.9.059, CPA.9.059.VH, CPA.9.059.VL, CPA.9.059.HC, CPA.9.059.LC, CPA.9.059.H1, CPA.9.059.H2, CPA.9.059.H3; CPA.9.059.H4; CPA.9.059.H4(S241P);

[0449] CPA.9.059.vhCDR1, CPA.9.059.vhCDR2, CPA.9.059.vhCDR3, CPA.9.059.vlCDR1, CPA.9.059.vlCDR2, CPA.9.059.vlCDR3 and scFv-CPA.9.059;

[0450] CPA.9.083, CPA.9.083.VH, CPA.9.083.VL, CPA.9.083.HC, CPA.9.083.LC, CPA.9.083.H1, CPA.9.083.H2, CPA.9.083.H3; CPA.9.083.H4; CPA.9.083.H4(S241P); CPA.9.083.vhCDR1, CPA.9.083.vhCDR2, CPA.9.083.vhCDR3, CPA.9.083.vlCDR1, CPA.9.083.vlCDR2, CPA.9.083.vlCDR3 and scFv-CPA.9.083;

[0451] CPA.9.086, CPA.9.086.VH, CPA.9.086.VL, CPA.9.086.HC, CPA.9.086.LC, CPA.9.086.H1, CPA.9.086.H2, CPA.9.086.H3; CPA.9.086.H4; CPA.9.086.H4(S241P); CPA.9.086.vhCDR1, CPA.9.086.vhCDR2, CPA.9.086.vhCDR3, CPA.9.086.vlCDR1, CPA.9.086.vlCDR2, CPA.9.086.vlCDR3 and scFv-CPA.9.086;

[0452] CPA.9.089, CPA.9.089.VH, CPA.9.089.VL, CPA.9.089.HC, CPA.9.089.LC, CPA.9.089.H1, CPA.9.089.H2, CPA.9.089.H3; CPA.9.089.H4; CPA.9.089.H4(S241P); CPA.9.089.vhCDR1, CPA.9.089.vhCDR2, CPA.9.089.vhCDR3, CPA.9.089.vlCDR1, CPA.9.089.vlCDR2, CPA.9.089.vlCDR3 and scFv-CPA.9.089;

[0453] CPA.9.093, CPA.9.093.VH, CPA.9.093.VL, CPA.9.093.HC, CPA.9.093.LC, CPA.9.093.H1, CPA.9.093.H2, CPA.9.093.H3; CPA.9.093.H4; CPA.9.093.H4(S241P); CPA.9.093.vhCDR1, CPA.9.093.vhCDR2, CPA.9.093.vhCDR3, CPA.9.093.vlCDR1, CPA.9.093.vlCDR2, CPA.9.093.vlCDR3 and scFv-CPA.9.093;

[0454] CPA.9.101, CPA.9.101.VH, CPA.9.101.VL, CPA.9.101.HC, CPA.9.101.LC, CPA.9.101.H1, CPA.9.101.H2, CPA.9.101.H3; CPA.9.101.H4; CPA.9.101.H4(S241P); CPA.9.101.vhCDR1, CPA.9.101.vhCDR2, CPA.9.101.vhCDR3, CPA.9.101.vlCDR1, CPA.9.101.vlCDR2, CPA.9.101.vlCDR3 and scFv-CPA.9.101; and

[0455] CPA.9.103, CPA.9.103.VH, CPA.9.103.VL, CPA.9.103.HC, CPA.9.103.LC, CPA.9.103.H1, CPA.9.103.H2, CPA.9.103.H3; CPA.9.103.H4; CPA.9.103.H4(S241P); CPA.9.103.vhCDR1, CPA.9.103.vhCDR2, CPA.9.103.vhCDR3, CPA.9.103.vlCDR1, CPA.9.103.vlCDR2, CPA.9.103.vlCDR3 and scFv-CPA.9.103.

[0456] Furthermore, the present invention provides a number of CHA antibodies, which are murine antibodies generated from hybridomas. As is well known the art, the six CDRs are useful when put into either human framework variable heavy and variable light regions or when the variable heavy and light domains are humanized. Accordingly, the present invention provides antibodies, usually full length or scFv domains, that comprise the following sets of CDRs, the sequences of which are shown in FIG. 23A-23D and/or the sequence listing:

[0457] CHA.9.536.1, CHA.9.536.1.VH, CHA.9.536.1.VL, CHA.9.536.1.HC, CHA.9.536.1.LC, CHA.9.536.1.H1, CHA.9.536.1.H2, CHA.9.536.1.H3; CHA.9.536.1.H4, CHA.9.536.1.H4(S241P), CHA.9.536.1.vhCDR1, CHA.9.536.1.vhCDR2, CHA.9.536.1.vhCDR3, CHA.9.536.1.vlCDR1, CHA.9.536.1.vlCDR2 and CHA.9.536.1.vhCDR3;

[0458] CHA.9.536.3, CHA.9.536.3.VH, CHA.9.536.3.VL, CHA.9.536.3.HC, CHA.9.536.3.LC, CHA.9.536.3.H1, CHA.9.536.3.H2, CHA.9.536.3.H3; CHA.9.536.3.H4, CHA.9.536.3.H4(S241P); CHA.9.536.3.vhCDR1, CHA.9.536.3.vhCDR2, CHA.9.536.3.vhCDR3, CHA.9.536.3.vlCDR1, CHA.9.536.3.vlCDR2 and CHA.9.536.3.vhCDR3;

[0459] CHA.9.536.4, CHA.9.536.4.VH, CHA.9.536.4.VL, CHA.9.536.4.HC, CHA.9.536.4.LC, CHA.9.536.4.H1, CHA.9.536.4.H2, CHA.9.536.4.H3; CHA.9.536.4.H4, CHA.9.536.4.H4(S241P), CHA.9.536.4.vhCDR1, CHA.9.536.4.vhCDR2, CHA.9.536.4.vhCDR3, CHA.9.536.4.vlCDR1, CHA.9.536.4.vlCDR2 and CHA.9.536.4.vhCDR3;

[0460] CHA.9.536.5, CHA.9.536.5.VH, CHA.9.536.5.VL, CHA.9.536.5.HC, CHA.9.536.5.LC, CHA.9.536.5.H1, CHA.9.536.5.H2, CHA.9.536.5.H3; CHA.9.536.5.H4, CHA.9.536.5.H4(S241P), CHA.9.536.5.vhCDR1, CHA.9.536.5.vhCDR2, CHA.9.536.5.vhCDR3, CHA.9.536.5.vlCDR1, CHA.9.536.5.vlCDR2 and CHA.9.536.5.vhCDR3;

[0461] CHA.9.536.6, CHA.9.536.6.VH, CHA.9.536.6.VL, CHA.9.536.6.HC, CHA.9.536.6.LC, CHA.9.536.6.H1, CHA.9.536.6.H2, CHA.9.536.6.H3; CHA.9.536.6.H4, CHA.9.536.6.vhCDR1, CHA.9.536.6.vhCDR2, CHA.9.536.6.vhCDR3, CHA.9.536.6.vlCDR1, CHA.9.536.6.vlCDR2 and CHA.9.536.6.vhCDR3;

[0462] CHA.9.536.7, CHA.9.536.7.VH, CHA.9.536.7.VL, CHA.9.536.7.HC, CHA.9.536.7.LC, CHA.9.536.7.H1, CHA.9.536.7.H2, CHA.9.536.7.H3; CHA.9.536.7.H4, CHA.9.536.5.H4(S241P); CHA.9.536.7.vhCDR1, CHA.9.536.7.vhCDR2, CHA.9.536.7.vhCDR3, CHA.9.536.7.vlCDR1, CHA.9.536.7.vlCDR2 and CHA.9.536.7.vhCDR3;

[0463] CHA.9.536.8, CHA.9.536.8.VH, CHA.9.536.8.VL, CHA.9.536.8.HC, CHA.9.536.8.LC, CHA.9.536.8.H1, CHA.9.536.8.H2, CHA.9.536.8.H3; CHA.9.536.8.H4, CHA.9.536.8.H4(S241P), CHA.9.536.8.vhCDR1, CHA.9.536.8.vhCDR2, CHA.9.536.8.vhCDR3, CHA.9.536.8.vlCDR1, CHA.9.536.8.vlCDR2 and CHA.9.536.8.vhCDR3;

[0464] CHA.9.560.1, CHA.9.560.1VH, CHA.9.560.1.VL, CHA.9.560.1.HC, CHA.9.560.1.LC, CHA.9.560.1.H1, CHA.9.560.1.H2, CHA.9.560.1.H3; CHA.9.560.1.H4, CHA.9.560.1.H4(S241P), CHA.9.560.1.vhCDR1, CHA.9.560.1.vhCDR2, CHA.9.560.1.vhCDR3, CHA.9.560.1.vlCDR1, CHA.9.560.1.vlCDR2 and CHA.9.560.1.vhCDR3;

[0465] CHA.9.560.3, CHA.9.560.3VH, CHA.9.560.3.VL, CHA.9.560.3.HC, CHA.9.560.3.LC, CHA.9.560.3.H1, CHA.9.560.3.H2, CHA.9.560.3.H3; CHA.9.560.3.H4, CHA.9.560.3.H4(S241P); CHA.9.560. 3.vhCDR1, CHA.9.560. 3.vhCDR2, CHA.9.560.3.vhCDR3, CHA.9.560.3.vlCDR1, CHA.9.560.3.vlCDR2 and CHA.9.560.3.vhCDR3;

[0466] CHA.9.560.4, CHA.9.560.4VH, CHA.9.560.4.VL, CHA.9.560.4.HC, CHA.9.560.4.LC, CHA.9.560.4.H1, CHA.9.560.4.H2, CHA.9.560.4.H3; CHA.9.560.4.H4, CHA.9.560.4.H4(S241P), CHA.9.560. 4.vhCDR1, CHA.9.560. 4.vhCDR2, CHA.9.560.4.vhCDR3, CHA.9.560.4.vlCDR1, CHA.9.560.4.vlCDR2 and CHA.9.560.4.vhCDR3;

[0467] CHA.9.560.5, CHA.9.560.5VH, CHA.9.560. 5.VL, CHA.9.560. 5.HC, CHA.9.560.5.LC, CHA.9.560.5.H1, CHA.9.560.5.H2, CHA.9.560.5.H3; CHA.9.560. 5.H4, CHA.9.560.5.vhCDR1, CHA.9.560.5.vhCDR2, CHA.9.560.5.vhCDR3, CHA.9.560.5.vlCDR1, CHA.9.560.5.vlCDR2 and CHA.9.560.5.vhCDR3;

[0468] CHA.9.560.6, CHA.9.560.6VH, CHA.9.560.6.VL, CHA.9.560. 6.HC, CHA.9.560.6.LC, CHA.9.560.6.H1, CHA.9560.6.H2, CHA.9.560.6.H3; CHA.9.560.6.H4, CHA.9.560.6.H4(S241P), CHA.9.560.6.vhCDR1, CHA.9.560.6.vhCDR2, CHA.9.560.6.vhCDR3, CHA.9.560.6.vlCDR1, CHA.9.560.6.vlCDR2 and CHA.9.560.6.vhCDR3;

[0469] CHA.9.560.7, CHA.9.560.7VH, CHA.9.560.7.VL, CHA.9.560.7.HC, CHA.9.560.7.LC, CHA.9.560.7.H1, CHA.9.560.7.H2, CHA.9.560.7.H3; CHA.9.560.7.H4; CHA.9.560.7.H4(S241P); CHA.9.560.7.vhCDR1, CHA.9.560.7.vhCDR2, CHA.9.560.7.vhCDR3, CHA.9.560.7.vlCDR1, CHA.9.560.7.vlCDR2 and CHA.9.560.7.vhCDR3;

[0470] CHA.9.560.8, CHA.9.560.8VH, CHA.9.560.8.VL, CHA.9.560.8.HC, CHA.9.560.8.LC, CHA.9.560.8.H1, CHA.9.560.8.H2, CHA.9.560.8.H3; CHA.9.560.8.H4, CHA.9.560.8.H4(S241P); CHA.9.560.8.vhCDR1, CHA.9.560.8.vhCDR2, CHA.9.560.8.vhCDR3, CHA.9.560.8.vlCDR1, CHA.9.560.8.vlCDR2 and CHA.9.560.8.vhCDR3;

[0471] CHA.9.546.1, CHA.9.546.1VH, CHA.9.546.1.VL, CHA.9.546.1.HC, CHA.9.546.1.LC, CHA.9.546.1.H1, CHA.9.546.1.H2, CHA.9.546.1.H3; CHA.9.546.1.H4, CHA.9.546.1.H4(S241P), CHA.9.546.1.vhCDR1, CHA.9.546.1.vhCDR2, CHA.9.546.1.vhCDR3, CHA.9.546.1.vlCDR1, CHA.9.546.1.vlCDR2 and CHA.9.546.1.vhCDR3;

[0472] CHA.9.547.1, CHA.9.547.1VH, CHA.9.547.1.VL, CHA.9.547.1.HC, CHA.9.547.1.LC, CHA.9.547.1.H1, CHA.9.547.1.H2, CHA.9.547.1.H3; CHA.9.547.1.H4, CHA.9.547.1.H4(S241P), CHA.9.547.1.vhCDR1, CHA.9.547.1.vhCDR2, CHA.9.547.1.vhCDR3, CHA.9.547.1.vlCDR1, CHA.9.547.1.vlCDR2 and CHA.9.547.1.vhCDR3;

[0473] CHA.9.547.2, CHA.9.547.2VH, CHA.9.547.2.VL, CHA.9.547.2.HC, CHA.9.547.2.LC, CHA.9.547.2.H1, CHA.9.547.2.H2, CHA.9.547.2.H3; CHA.9.547.2.H4, CHA.9.547.2.H4(S241P), CHA.9.547.2.vhCDR1, CHA.9.547.2.vhCDR2, CHA.9.547. 2.vhCDR3, CHA.9.547.2.vlCDR1, CHA.9.547.2.vlCDR2 and CHA.9.547.2.vhCDR3;

[0474] CHA.9.547.3, CHA.9.547. 3VH, CHA.9.547. 3.VL, CHA.9.547. 3.HC, CHA.9.547. 3.LC, CHA.9.547. 3.H1, CHA.9.547. 3.H2, CHA.9.547. 3.H3; CHA.9.547.3.H4, CHA.9.547.3.H4(S241P), CHA.9.547. 3.vhCDR1, CHA.9.547. 3.vhCDR2, CHA.9.547. 3.vhCDR3, CHA.9.547. 3.vlCDR1, CHA.9.547. 3.vlCDR2 and CHA.9.547. 3.vhCDR3;

[0475] CHA.9.547.4, CHA.9.547. 4VH, CHA.9.547. 4.VL, CHA.9.547. 4.HC, CHA. 9.547. 4.LC, CHA.9.547. 4.H1, CHA.9.547. 4.H2, CHA.9.547. 4.H3; CHA.9.547.4.H4, CHA.9.547.4.H4(S241P), CHA.9.547. 4.vhCDR1, CHA.9.547. 4.vhCDR2, CHA.9.547. 4.vhCDR3, CHA.9.547. 4.vlCDR1, CHA.9.547. 4.vlCDR2 and CHA.9.547. 4.vhCDR3;

[0476] CHA.9.547.6, CHA.9.547. 6 VH, CHA.9.547. 6.VL, CHA.9.547. 6.HC, CHA.9.547. 6.LC, CHA.9.547. 6.H1, CHA.9.547. 6.H2, CHA.9.547. 6.H3; CHA.9.547.6.H4, CHA.9.547.6.H4(S241P), CHA.9.547. 6.vhCDR1, CHA.9.547. 6.vhCDR2, CHA.9.547. 6.vhCDR3, CHA.9.547. 6.vlCDR1, CHA.9.547. 6.vlCDR2 and CHA.9.547. 6.vhCDR3;

[0477] CHA.9.547.7, CHA.9.547. 7VH, CHA.9.547. 7.VL, CHA.9.547. 7.HC, CHA.9.547. 7.LC, CHA.9.547. 7.H1, CHA.9.547. 7.H2, CHA.9.547. 7.H3; CHA.9.547.7.H4, CHA.9.547.7.H4(S241P), CHA.9.547. 7.vhCDR1, CHA.9.547. 7.vhCDR2, CHA.9.547. 7.vhCDR3, CHA.9.547. 7.vlCDR1, CHA.9.547. 7.vlCDR2 and CHA.9.547. 7.vhCDR3;

[0478] CHA.9.547.8, CHA.9.547. 8VH, CHA.9.547. 8.VL, CHA.9.547. 8.HC, CHA.9.547.8.LC, CHA.9.547. 8.H1, CHA.9.547. 8.H2, CHA.9.547. 8.H3; CHA.9.547.8.H4, CHA.9.547.8.H4(S241P), CHA.9.547. 8.vhCDR1, CHA.9.547. 8.vhCDR2, CHA.9.547. 8.vhCDR3, CHA.9.547. 8.vlCDR1, CHA.9.547. 8.vlCDR2 and CHA.9.547. 8.vhCDR3;

[0479] CHA.9.547.9, CHA.9.547.9, CHA.9.547.9VH, CHA.9.547.9.VL, CHA.9. 547.9.HC, CHA.9.547.9.LC, CHA.9.547.9.H1, CHA.9.547.9.H2, CHA.9.547.9.H3; CHA.9.547.9.H4, CHA.9.547.9.H4, CHA.9.547.9.H4(S241P), CHA.9.547.9.H4(S241P), CHA.9.547.9.vhCDR1, CHA.9.547.9.vhCDR2, CHA.9.547.9.vhCDR3, CHA.9.547.9.vlCDR1, CHA.9.547.9.vlCDR2 and CHA.9.547.9.vhCDR3;

[0480] CHA.9.547.13, CHA.9.547.13, CHA.9.547. 13VH, CHA.9. 547.13.VL, CHA.9. 547.13.HC, CHA.9.547.13.LC, CHA.9.547.13.H1, CHA.9.547.13.H2, CHA.9. 547.13.H3; CHA.9.547.13.H4, CHA.9.547.13.H4, CHA.9.547.13.H4(S241P), CHA.9.547.13.H4(S241P), CHA.9.547.13.vhCDR1, CHA.9.547.13.vhCDR2, CHA.9.547. 13.vhCDR3, CHA.9.547.13.vlCDR1, CHA.9.547.13.vlCDR2 and CHA.9.547. 13.vhCDR3;

[0481] CHA.9.541.1, CHA.9.541.1.VH, CHA.9.541.1.VL, CHA.9.541.1.HC, CHA.9.541.1.LC, CHA.9.541.1.H1, CHA.9.541.1.H2, CHA.9.541.1.H3; CHA.9.541.1.H4, CHA.9.541.1.H4(S241P), CHA.9.541.1.vhCDR1, CHA.9.541.1.vhCDR2, CHA.9.541.1.vhCDR3, CHA.9.541.1.vlCDR1, CHA.9.541.1.vlCDR2 and CHA. 9.541.1.vhCDR3;

[0482] CHA.9.541.3, CHA.9.541. 3.VH, CHA.9.541. 3.VL, CHA.9.541. 3.HC, CHA.9.541. 3.LC, CHA.9.541. 3.H1, CHA.9.541. 3.H2, CHA.9.541. 3.H3; CHA.9.541.3.H4, CHA.9.541.3.H4(S241P), CHA.9.541. 3.vhCDR1, CHA.9.541. 3.vhCDR2, CHA.9.541. 3.vhCDR3, CHA.9.541. 3.vlCDR1, CHA.9.541. 3.vlCDR2 and CHA.9.541. 3.vhCDR3;

[0483] CHA.9.541.4, CHA.9.541.4.VH, CHA.9.541. 4.VL, CHA.9.541. 4.HC, CHA.9.541. 4.LC, CHA.9.541. 4.H1, CHA.9.541. 4.H2, CHA.9.541. 4.H3; CHA.9.541.4.H4, CHA.9.541.4.H4(S241P), CHA.9.541. 4.vhCDR1, CHA.9.541. 4.vhCDR2, CHA.9.541. 4.vhCDR3, CHA.9.541. 4.vlCDR1, CHA.9.541. 4.vlCDR2 and CHA.9.541. 4.vhCDR3;

[0484] CHA.9.541.5, CHA.9.541. 5.VH, CHA.9.541. 5.VL, CHA.9.541. 5.HC, CHA.9.541. 5.LC, CHA.9.541. 5.H1, CHA.9.541. 5.H2, CHA.9.541. 5.H3; CHA.9.541.5.H4, CHA.9.541.5.H4(S241P), CHA.9.541. 5.vhCDR1, CHA.9.541. 5.vhCDR2, CHA.9.541. 5.vhCDR3, CHA.9.541. 5.vlCDR1, CHA.9.541. 5.vlCDR2 and CHA.9.541. 5.vhCDR3;

[0485] CHA.9.541.6, CHA.9.541. 6.VH, CHA.9.541. 6.VL, CHA.9.541. 6.HC, CHA.9.541. 6.LC, CHA.9.541. 6.H1, CHA.9.541. 6.H2, CHA.9.541.6.H3; CHA.9.541.6.H4, CHA.9.541.6.H4(S241P), CHA.9.541. 6.vhCDR1, CHA.9.541. 6.vhCDR2, CHA.9.541. 6.vhCDR3, CHA.9.541. 6.vlCDR1, CHA.9.541. 6.vlCDR2 and CHA.9.541. 6.vhCDR3;

[0486] CHA.9.541.7, CHA.9.541. 7.VH, CHA.9.541. 7.VL, CHA.9.541. 7.HC, CHA.9.541. 7.LC, CHA.9.541. 7.H1, CHA.9.541. 7.H2, CHA.9.541. 7.H3; CHA.9.541.7.H4, CHA.9.541.7.H4(S241P), CHA.9.541. 7.vhCDR1, CHA.9.541. 7.vhCDR2, CHA.9.541. 7.vhCDR3, CHA.9.541. 7.vlCDR1, CHA.9.541. 7.vlCDR2 and CHA.9.541. 7.vhCDR3; and

[0487] CHA.9.541.8, CHA.9.541. 8.VH, CHA.9.541. 8.VL, CHA.9.541. 8.HC, CHA.9.541. 8.LC, CHA.9.541. 8.H1, CHA.9.541. 8.H2, CHA.9.541. 8.H3; CHA.9.541.8.H4, CHA.9.541.8.H4(S241P); CHA.9.541. 8vhCDR1, CHA.9.541. 8.vhCDR2, CHA.9.541. 8.vhCDR3, CHA.9.541. 8.vlCDR1, CHA.9.541. 8.vlCDR2 and CHA.9.541. 8.vhCDR3.

[0488] CHA.9.547.18vhCDR1, CHA.9.547.18.vhCDR2, CHA.9.547.18.vhCDR3, CHA.9.547.18.vlCDR1, CHA.9.547.18vlCDR2, and CHA.9.547.18.vlCDR3.

[0489] In the case of scFvs comprising the CDRs of the antibodies above, these are labeled as scFvs that include a scFv comprising a variable heavy domain with the vhCDRs, a linker and a variable light domain with the vlCDRs, again as above in either orientation. Thus the invention includes scFv-CHA.9.536.3.1, scFv-CHA.9.536.3, scFv-CHA.9.536.4, scFv-CHA.9.536.5, scFv-CHA.9.536.7, scFv-CHA.9.536.8, scFv-CHA.9.560.1, scFv-CHA.9.560.3, scFv-CHA.9.560.4, scFv-CHA.9.560.5, scFv-CHA.9.560.6, scFv-CHA.9.560.7, scFv-CHA.9.560.8, scFv-CHA.9.546.1, scFv-CHA.9.547.1, scFv-CHA.9.547.2, scFv-CHA.9.547.3, scFv-CHA.9.547.4, scFv-CHA.9.547.6, scFv-CHA.9.547.7, scFv-CHA.9.547.8, scFv-CHA.9.547.9, scFv-CHA.9.547.13, scFv-CHA.9.541.1, scFv-CHA.9.541.3, scFv-CHA.9.541.4, scFv-CHA.9.541.5, scFv-CHA.9.541.6, scFv-CHA.9.541.7 and scFv-CHA.9.541.8.

[0490] In addition, CHA.9.543 binds to TIGIT but does not block the TIGIT-PVR interaction.

[0491] As discussed herein, the invention further provides variants of the above components (CPA and CHA), including variants in the CDRs, as outlined above. Thus, the invention provides antibodies comprising a set of 6 CDRs as outlined herein that can contain one, two or three amino acid differences in the set of CDRs, as long as the antibody still binds to TIGIT. Suitable assays for testing whether an anti-PVRIG/anti-TIGIT bispecific antibody that contains mutations as compared to the CDR sequences outlined herein are known in the art, such as Biacore assays.

[0492] In addition, the invention further provides variants of the above variable heavy and light chains. In this case, the variable heavy chains can be 80%, 90%, 95%, 98% or 99% identical to the “VH” sequences herein, and/or contain from 1, 2, 3, 4, 5, 6, 7, 8, 9, 10 amino acid changes, or more, when Fc variants are used. Variable light chains are provided that can be 80%, 90%, 95%, 98% or 99% identical to the “VL” sequences herein (and in particular CPA.9.086), and/or contain from 1, 2, 3, 4, 5, 6, 7, 8, 9, 10 amino acid changes, or more, when Fc variants are used. In these embodiments, the invention includes these variants as long as the anti-PVRIG/anti-TIGIT bispecific antibody still binds to TIGIT. Suitable assays for testing whether an anti-TIGIT antibody that contains mutations as compared to the CDR sequences outlined herein are known in the art, such as Biacore assays.

[0493] Similarly, heavy and light chains are provided that are 80%, 90%, 95%, 98% or 99% identical to the full length “HC” and “LC” sequences herein (and in particular CPA.9.086), and/or contain from 1, 2, 3, 4, 5, 6, 7, 8, 9, 10 amino acid changes, or more, when Fc variants are used. In these embodiments, the invention includes these variants as long as the anti-PVRIG/anti-TIGIT bispecific antibody still binds to TIGIT. Suitable assays for testing whether an anti-PVRIG/anti-TIGIT bispecific antibody that contains mutations as compared to the CDR sequences outlined herein are known in the art, such as Biacore assays.

[0494] In addition, the framework regions of the variable heavy and variable light chains of either the CPA or CHA antibodies herein can be humanized (or, in the case of the CHA antibodies, “rehumanized”, to the extent that alternative humanization methods can be done) as is known in the art (with occasional variants generated in the CDRs as needed), and thus humanized variants of the VH and VL chains of FIG. 23A-23D can be generated (and in particular CPA.9.086). Furthermore, the humanized variable heavy and light domains can then be fused with human constant regions, such as the constant regions from IgG1, IgG2, IgG3 and IgG4 (including IgG4(S241P)).

[0495] In particular, as is known in the art, murine VH and VL chains can be humanized as is known in the art, for example, using the IgBLAST program of the NCBI website, as outlined in Ye et al. Nucleic Acids Res. 41:W34-W40 (2013), herein incorporated by reference in its entirety for the humanization methods. IgBLAST takes a murine VH and/or VL sequence and compares it to a library of known human germline sequences. As shown herein, for the humanized sequences generated herein, the databases used were IMGT human VH genes (F+ORF, 273 germline sequences) and IMGT human VL kappa genes (F+ORF, 74 germline sequences). An exemplary five CHA sequences were chosen: CHA.9.536, CHA9.560, CHA.9.546, CHA.9.547 and CHA.9.541 (see FIG. 23A-23D). For this embodiment of the humanization, human germline IGHV1-46(allele1) was chosen for all 5 as the acceptor sequence and the human heavy chain IGHJ4(allele1) joining region (J gene). For three of four (CHA.7.518, CHA.7.530, CHA.7.538_1 and CHA.7.538_2), human germline IGKV1-39(allele 1) was chosen as the acceptor sequence and human light chain IGKJ2(allele1) (J gene) was chosen. The J gene was chosen from human joining region sequences compiled at IMGT® the international ImMunoGeneTics information system as www.imgt.org. CDRs were defined according to the AbM definition (see www.bioinfo.org.uk/abs/). In some embodiments, the anti-PVRIG/anti-TIGIT bispecific antibodies of the present invention include TIGIT binding portions or antigen binding domainswherein the V_{H} and V_{L} sequences of different TIGIT binding portions or antigen binding domains can be “mixed and matched” to create other TIGIT binding portions or antigen binding domains. TIGIT binding of such “mixed and matched” anti-PVRIG/anti-TIGIT bispecific antibodies can be tested using the binding assays described above. e.g., ELISAs or Biacore assays). In some embodiments, when V_{H} and V_{L} chains are mixed and matched, a V_{H} sequence from a particular V_{H}/V_{L} pairing is replaced with a structurally similar V_{H} sequence. Likewise, in some embodiments, a V_{L} sequence from a particular V_{H}/V_{L} pairing is replaced with a structurally similar V_{L} sequence. For example, the V_{H} and V_{L} sequences of homologous antibodies are particularly amenable for mixing and matching.

[0496] Accordingly, the anti-PVRIG/anti-TIGIT bispecific antibodies of the invention comprise CDR amino acid sequences selected from the group consisting of (a) sequences as listed herein; (b) sequences that differ from those CDR amino acid sequences specified in (a) by 1, 2, 3, 4, 5, 6, 7, 8, 9, 10 or more amino acid substitutions; (c) amino acid sequences having 90% or greater, 95% or greater, 98% or greater, or 99% or greater sequence identity to the sequences specified in (a) or (b); (d) a polypeptide having an amino acid sequence encoded by a polynucleotide having a nucleic acid sequence encoding the amino acids as listed herein. In particular, the anti-PVRIG/anti-TIGIT bispecific antibody can comprise the antigen bidng domain from the the CPA.9.086 antibody which can have sequences selected from (a), (b), (c) or (d).

[0497] In some embodiments, the anti-PVRIG/anti-TIGIT bispecific antibody comprises the following sequences (FIG. 26A-26B; amino acid substitutions for the knob into hole heterodimerization approach are bold and underlined):

CHA.7.518.1.H4(S241P) VH IgG1 CH1 IgG4 CH2—CH3 S354C, E356D, M358L,
T366W
(SEQ ID NO: 3175)
QVQLVQSGAEVKKPGASVKVSCKASGYTFTDYNINWVRQAPGQGLEWMGYIYPYIGGSGYAQKFQGRVT
MTRDTSTSTVYMELSSLRSEDTAVYYCAREDKTARNAMDYWGQGTLVTVSSASTKGPSVFPLAPCSRST
SESTAALGCLVKDYFPEPVTVSWNSGALTSGVHTFPAVLQSSGLYSLSSVVTVPSSSLGTKTYTCNVDH
KPSNTKVDKRVESKYGPPCPPCPAPEFLGGPSVFLFPPKPKDTLMISRTPEVTCVVVDVSQEDPEVQFN
WYVDGVEVHNAKTKPREEQFNSTYRVVSVLTVLHQDWLNGKEYKCKVSNKGLPSSIEKTISKAKGQPRE
PQVYTLPPCQDELTKNQVSLWCLVKGFYPSDIAVEWESNGQPENNYKTTPPVLDSDGSFFLYSRLTVDK
SRWQEGNVFSCSVMHEALHNHYTQKSLSLSPGK;
CHA.7.518.1.H4(S241P) VL Ckappa
(SEQ ID NO: 3176)
DIQMTQSPSSLSASVGDRVTITCRVSENIYSNLAWYQQKPGKAPKLLIYEATNLAEGVPSRFSGSGSGT
DFTLTISSLQPEDFATYYCQHFWGTPYTFGQGTKLEIKRTVAAPSVFIFPPSDEQLKSGTASVVCLLNN
FYPREAKVQWKVDNALQSGNSQESVTEQDSKDSTYSLSSTLTLSKADYEKHKVYACEVTHQGLSSPVTK
SFNRGEC;
and
CPA.9.086 HC Clambda Crossmab IgG4 Y349C, E356D, M358L, T366S, L368A,
Y407V
(SEQ ID NO: 3177)
EVQLVETGGGLIQPGRSLRLSCAASGFTFSSYAMHWVRQAPGKGLEWVAVISYAGEVKYYADSVKGRFT
ISRDNSKNTLYLQMNSLRAEDTAVYYCARDPLPLHYYGMDVWGQGTTVTVSSASGQPKAAPSVTLFPPS
SEELQANKATLVCLISDFYPGAVTVAWKADSSPVKAGVETTTPSKQSNNKYAASSYLSLTPEQWKSHRS
YSCQVTHEGSTVEKTVAPTECSESKYGPPCPPCPAPEFLGGPSVFLFPPKPKDTLMISRTPEVTCVVVD
VSQEDPEVQFNWYVDGVEVHNAKTKPREEQFNSTYRVVSVLTVLHQDWLNGKEYKCKVSNKGLPSSIEK
TISKAKGQPREPQVCTLPPSQDELTKNQVSLSCAVKGFYPSDIAVEWESNGQPENNYKTTPPVLDSDGS
FFLVSRLTVDKSRWQEGNVFSCSVMHEALHNHYTQKSLSLSPGK;
CPA.9.086 LC CH1
(SEQ ID NO: 3178)
QSALTQPRSASGNPGQRVTISCSGSSSNMGRRPVNWYQQIPGTAPKLLIYSQNQRPSGVPDRFSGSQSG
TSASLTISGLQSEDEAEYFCAVWDDIGRVLQLGGGTQLAVLSSASTKGPSVFPLAPSSKSTSGGTAALG
CLVKDYFPEPVTVSWNSGALTSGVHTFPAVLQSSGLYSLSSVVTVPSSSLGTQTYICNVNHKPSNTKVD
KKVEPKSC.

[0498] In some embodiments, the anti-PVRIG/anti-TIGIT bispecific antibody comprises the following sequences:

CHA.7.518.1 VH

(SEQ ID NO: 1539)

QVQLVQSGAEVKKPGASVKVSCKASGYTFTDYNINWVRQAPGQGLEWM
GYIYPYIGGSGYAQKFQGRVTMTRDTSTSTVYMELSSLRSEDTAVYYCA
REDKTARNAMDYWGQGTLVTVSS;
CHA.7.518.1 VL

(SEQ ID NO: 1544)

DIQMTQSPSSLSASVGDRVTITCRVSENIYSNLAWYQQKPGKAPKLLIY
EATNLAEGVPSRFSGSGSGTDFTLTISSLQPEDFATYYCQHFWGTPYT
FGQGTKLEIK;
and
CPA.9.086 VH

(SEQ ID NO: 1634)

EVQLVETGGGLIQPGRSLRLSCAASGFTFSSYAMHWVRQAPGKGLEWV
AVISYAGEVKYYADSVKGRFTISRDNSKNTLYLQMNSLRAEDTAVYYCA
RDPLPLHYYGMDVWGQGTTVTVSS;
CPA.9.086 VL

(SEQ ID NO: 1639)

QSALTQPRSASGNPGQRVTISCSGSSSNMGRRPVNWYQQIPGTAPKLLI
YSQNQRPSGVPDRFSGSQSGTSASLTISGLQSEDEAEYFCAVWDDIGR
VLQLGGGTQLAVL.

[0499] In some embodiments, the anti-PVRIG/anti-TIGIT bispecific antibody comprises the following sequences:

CHA.7.518.4 VH

(SEQ ID NO: 3179)

QVQLVQSGAEVKKPGASVKVSCKASGYTFTDYNINWVRQAPGQGLEWM
GYIYPYIGGSGYAQKFQGRVTMTRDTSTSTVYMELSSLRSEDTAVYYCA
REDKTARNAMDYWGQGTLVTVSS;
CHA.7.518.4 VL

(SEQ ID NO: 3180)

DIQMTQSPSSLSASVGDRVTITCRVSENIYDVLAWYQQKPGKAPKLLIY
EATNLAEGVPSRFSGSGSGTDFTLTISSLQPEDFATYYCQHFWGTPYT
FGQGTKLEIK;
and
CPA.9.086 VH

(SEQ ID NO: 1634)

EVQLVETGGGLIQPGRSLRLSCAASGFTFSSYAMHWVRQAPGKGLEWVA
VISYAGEVKYYADSVKGRFTISRDNSKNTLYLQMNSLRAEDTAVYYCAR
DPLPLHYYGMDVWGQGTTVTVSS;
CPA.9.086 VL

(SEQ ID NO: 1639)

QSALTQPRSASGNPGQRVTISCSGSSSNMGRRPVNWYQQIPGTAPKLL
IYSQNQRPSGVPDRFSGSQSGTSASLTISGLQSEDEAEYFCAVWDDIGR
VLQLGGGTQLAVL.

[0500] In some embodiments, the anti-PVRIG/anti-TIGIT bispecific antibody comprises the following sequences:

CHA.7.518.1 VH

(SEQ ID NO: 1539)

QVQLVQSGAEVKKPGASVKVSCKASGYTFTDYNINWVRQAPGQGLEWM
GYIYPYIGGSGYAQKFQGRVTMTRDTSTSTVYMELSSLRSEDTAVYYCA
REDKTARNAMDYWGQGTLVTVSS;
CHA.7.518.1 VL

(SEQ ID NO: 1544)

DIQMTQSPSSLSASVGDRVTITCRVSENIYSNLAWYQQKPGKAPKLLIY
EATNLAEGVPSRFSGSGSGTDFTLTISSLQPEDFATYYCQHFWGTPYT
FGQGTKLEIK;
and
CHA.9.547.18 VH

(SEQ ID NO: 1664)

EVQLVESGGGLVQPGGSLRLSCAASGFTFSSYIMSWVRQAPGKGLEWVA
TISGGSKGQYYADSVKGRFTISRDNSKNTLYLQMNSLRAEDTAVYYCAK
WLLSYYAMDYWGQGTLVTVSS;
CHA.9.547.18 VL

(SEQ ID NO: 1668)

DIQMTQSPSSLSASVGDRITITCRASQSMAIWLSWYQQKPGKAPKLLIY
KASKSHTGVPSRFSGSGSGTDFTLTISSLQPEDFATYYCQQGQSYPYTF
GQGTKLEIK.

[0501] In some embodiments, the anti-PVRIG/anti-TIGIT bispecific antibody comprises the following sequences:

CHA.7.518.4 VH

(SEQ ID NO: 3179)

QVQLVQSGAEVKKPGASVKVSCKASGYTFTDYNINWVRQAPGQGLEWMGY
IYPYIGGSGYAQKFQGRVTMTRDTSTSTVYMELSSLRSEDTAVYYCARED
KTARNAMDYWGQGTLVTVSS;
CHA.7.518.4 VL

(SEQ ID NO: 3180)

DIQMTQSPSSLSASVGDRVTITCRVSENIYDVLAWYQQKPGKAPKLLIYE
ATNLAEGVPSRFSGSGSGTDFTLTISSLQPEDFATYYCQHFWGTPYTFGQ
GTKLEIK;
and
CHA.9.547.18 VH

(SEQ ID NO: 1664)

EVQLVESGGGLVQPGGSLRLSCAASGFTFSSYIMSWVRQAPGKGLEWVAT
ISGGSKGQYYADSVKGRFTISRDNSKNTLYLQMNSLRAEDTAVYYCAKWL
LSYYAMDYWGQGTLVTVSS;
CHA.9.547.18 VL

(SEQ ID NO: 1668)

DIQMTQSPSSLSASVGDRITITCRASQSMAIWLSWYQQKPGKAPKLLIYK
ASKSHTGVPSRFSGSGSGTDFTLTISSLQPEDFATYYCQQGQSYPYTFGQ
GTKLEIK.

[0502] In some embodiments, the anti-PVRIG portion of the anti-PVRIG/anti-TIGIT bispecific antibody comprises one of the following anti-PVRIG sequences. ( ) in the sequences below indicates a deletion relative to the reference human IgG4 amino acid sequence. Bolded text indicates amino acid substitutions relative to the reference IgG4 sequence.

[0503] In some embodiments, the anti-PVRIG portion of the anti-PVRIG/anti-TIGIT bispecific antibody comprises one of the following sequences:

CHA.7.518.1 scFv (VL-linker-VH) hIgG4 Variant 1
(SEQ ID NO: 3217)

DIQMTQSPSSLSASVGDRVTITCRVSENIYSNLAWYQQKPGKAPKLLIYEATNLAEGVPSRFSGSGSGTDFT
LTISSLQPEDFATYYCQHFWGTPYTFGQGTKLEIKggggsggggsggggsQVQLVQSGAEVKKPGASVKVSC
KASGYTFTDYNINWVRQAPGQGLEWMGYIYPYIGGSGYAQKFQGRVTMTRDTSTSTVYMELSSLRSEDTAVY
YCAREDKTARNAMDYWGQGTLVTVSSESKYGPPCPPCPAPPVA()GPSVFLFPPKPKDTLMISRTPEVTCVV
VDVKQEDPEVQFNWYVDGVEVHNAKTKPREEQFNSTYRVVSVLTVLHQDWLNGKEYKCKVSNKGLPSSIEKT
ISKAKGQPREPQVYTLPPSQEQMTKNQVKLTCLVKGFYPSDIAVEWESNGQPENNYKTTPPVLDSDGSFFLY
SRLTVDKSRWQEGNVFSCSVMHEALHNHYTQKSLSLSPG;
CHA.7.518.1 scFv (VH-linker-VL) hIgG4 Variant 1

(SEQ ID NO: 3227)
QVQLVQSGAEVKKPGASVKVSCKASGYTFTDYNINWVRQAPGQGLEWMGYIYPYIGGSGYAQKFQGRVTMTR
DTSTSTVYMELSSLRSEDTAVYYCAREDKTARNAMDYWGQGTLVTVSSggggsggggsggggsDIQMTQSPS
SLSASVGDRVTITCRVSENIYSNLAWYQQKPGKAPKLLIYEATNLAEGVPSRFSGSGSGTDFTLTISSLQPE
DFATYYCQHFWGTPYTFGQGTKLEIKESKYGPPCPPCPAPPVA()GPSVFLFPPKPKDTLMISRTPEVTCVV
VDVKQEDPEVQFNWYVDGVEVHNAKTKPREEQFNSTYRVVSVLTVLHQDWLNGKEYKCKVSNKGLPSSIEKT
ISKAKGQPREPQVYTLPPSQEQMTKNQVKLTCLVKGFYPSDIAVEWESNGQPENNYKTTPPVLDSDGSFFLY
SRLTVDKSRWQEGNVFSCSVMHEALHNHYTQKSLSLSPG;
CHA.7.518.1 scFv (VL-linker-VH) hIgG4 Variant 2
(SEQ ID NO: 3237)
DIQMTQSPSSLSASVGDRVTITCRVSENIYSNLAWYQQKPGKAPKLLIYEATNLAEGVPSRFSGSGSGTDFT
LTISSLQPEDFATYYCQHFWGTPYTFGQGTKLEIKggggsggggsggggsQVQLVQSGAEVKKPGASVKVSC
KASGYTFTDYNINWVRQAPGQGLEWMGYIYPYIGGSGYAQKFQGRVTMTRDTSTSTVYMELSSLRSEDTAVY
YCAREDKTARNAMDYWGQGTLVTVSSESKYGPPCPPCPAPPVA()GPSVFLFPPKPKDTLMISRTPEVTCVV
VDVKQEDPEVQFNWYVDGVEVHNAKTKPREEEFNSTYRVVSVLTVLHQDWLNGKEYKCKVSNKGLPSSIEKT
ISKAKGQPREPQVYTLPPSQEEMTKNQVSLTCDVSGFYPSDIAVEWESDGQPENNYKTTPPVLDSDGSFFLY
SRLTVDKSRWEEGDVFSCSVMHEALHNHYTQKSLSLSPG;
CHA.7.518.1 scFv (VH-linker-VL) hIgG4 Variant 2
(SEQ ID NO: 3247)
QVQLVQSGAEVKKPGASVKVSCKASGYTFTDYNINWVRQAPGQGLEWMGYIYPYIGGSGYAQKFQGRVTMTR
DTSTSTVYMELSSLRSEDTAVYYCAREDKTARNAMDYWGQGTLVTVSSggggsggggsggggsDIQMTQSPS
SLSASVGDRVTITCRVSENIYSNLAWYQQKPGKAPKLLIYEATNLAEGVPSRFSGSGSGTDFTLTISSLQPE
DFATYYCQHFWGTPYTFGQGTKLEIKESKYGPPCPPCPAPPVA()GPSVFLFPPKPKDTLMISRTPEVTCVV
VDVKQEDPEVQFNWYVDGVEVHNAKTKPREEEFNSTYRVVSVLTVLHQDWLNGKEYKCKVSNKGLPSSIEKT
ISKAKGQPREPQVYTLPPSQEEMTKNQVSLTCDVSGFYPSDIAVEWESDGQPENNYKTTPPVLDSDGSFFLY
SRLTVDKSRWEEGDVFSCSVMHEALHNHYTQKSLSLSPG;;
CHA.7.518.1 hIgG4 Variant 1
(SEQ ID NO: 3257)
QVQLVQSGAEVKKPGASVKVSCKASGYTFTDYNINWVRQAPGQGLEWMGYIYPYIGGSGYAQKFQGRVTMTR
DTSTSTVYMELSSLRSEDTAVYYCAREDKTARNAMDYWGQGTLVTVSSASTKGPSVFPLAPCSRSTSESTAA
LGCLVKDYFPEPVTVSWNSGALTSGVHTFPAVLQSSGLYSLSSVVTVPSSSLGTKTYTCNVDHKPSNTKVDK
RVESKYGPPCPPCPAPPVA()GPSVFLFPPKPKDTLMISRTPEVTCVVVDVKQEDPEVQFNWYVDGVEVHNA
KTKPREEQFNSTYRVVSVLTVLHQDWLNGKEYKCKVSNKGLPSSIEKTISKAKGQPREPQVYTLPPSQEQMT
KNQVKLTCLVKGFYPSDIAVEWESNGQPENNYKTTPPVLDSDGSFFLYSRLTVDKSRWQEGNVFSCSVMHEA
LHNHYTQKSLSLSPG;;
CHA.7.518.1 hIgG4 Variant 2
(SEQ ID NO: 3267)
QVQLVQSGAEVKKPGASVKVSCKASGYTFTDYNINWVRQAPGQGLEWMGYIYPYIGGSGYAQKFQGRVTMTR
DTSTSTVYMELSSLRSEDTAVYYCAREDKTARNAMDYWGQGTLVTVSSASTKGPSVFPLAPCSRSTSESTAA
LGCLVKDYFPEPVTVSWNSGALTSGVHTFPAVLQSSGLYSLSSVVTVPSSSLGTKTYTCNVDHKPSDTKVDK
RVESKYGPPCPPCPAPPVA()GPSVFLFPPKPKDTLMISRTPEVTCVVVDVKQEDPEVQFNWYVDGVEVHNA
KTKPREEEFNSTYRVVSVLTVLHQDWLNGKEYKCKVSNKGLPSSIEKTISKAKGQPREPQVYTLPPSQEEMT
KNQVSLTCDVSGFYPSDIAVEWESDGQPENNYKTTPPVLDSDGSFFLYSRLTVDKSRWEEGDVFSCSVMHEA
LHNHYTQKSLSLSPG;;
CHA.7.518.1 VH Clambda-VL-CH1 Crossmab hIgG4 Fc Y349C E356D L358L T366S
L368A Y407V Hole
(SEQ ID NO: 3277)
QVQLVQSGAEVKKPGASVKVSCKASGYTFTDYNINWVRQAPGQGLEWMGYIYPYIGGSGYAQKFQGRVTMTR
DTSTSTVYMELSSLRSEDTAVYYCAREDKTARNAMDYWGQGTLVTVSSASVAAPSVFIFPPSDEQLKSGTAS
VVCLLNNFYPREAKVQWKVDNALQSGNSQESVTEQDSKDSTYSLSSTLTLSKADYEKHKVYACEVTHQGLSS
PVTKSFNRGECESKYGPPCPPCPAPEFLGGPSVFLFPPKPKDTLMISRTPEVTCVVVDVSQEDPEVQFNWYV
DGVEVHNAKTKPREEQFNSTYRVVSVLTVLHQDWLNGKEYKCKVSNKGLPSSIEKTISKAKGQPREPQVCTL
PPSQDELTKNQVSLSCAVKGFYPSDIAVEWESNGQPENNYKTTPPVLDSDGSFFLVSRLTVDKSRWQEGNVF
SCSVMHEALHNHYTQKSLSLSPG;;
CHA.7.518.1 VH Clambda-VL-CH1 Crossmab hIgG4 Fc Y354C E356D M348L T366W
Knob
(SEQ ID NO: 3287)
QVQLVQSGAEVKKPGASVKVSCKASGYTFTDYNINWVRQAPGQGLEWMGYIYPYIGGSGYAQKFQGRVTMTR
DTSTSTVYMELSSLRSEDTAVYYCAREDKTARNAMDYWGQGTLVTVSSASVAAPSVFIFPPSDEQLKSGTAS
VVCLLNNFYPREAKVQWKVDNALQSGNSQESVTEQDSKDSTYSLSSTLTLSKADYEKHKVYACEVTHQGLSS
PVTKSFNRGECESKYGPPCPPCPAPEFLGGPSVFLFPPKPKDTLMISRTPEVTCVVVDVSQEDPEVQFNWYV
DGVEVHNAKTKPREEQFNSTYRVVSVLTVLHQDWLNGKEYKCKVSNKGLPSSIEKTISKAKGQPREPQVYTL
PPCQDELTKNQVSLWCLVKGFYPSDIAVEWESNGQPENNYKTTPPVLDSDGSFFLYSRLTVDKSRWQEGNVF
SCSVMHEALHNHYTQKSLSLSPG;;
CHA.7.518.1 VH hIgG4 Fc Y349C E356D L358L T366S L368A Y407V Hole
(SEQ ID NO: 3297)
QVQLVQSGAEVKKPGASVKVSCKASGYTFTDYNINWVRQAPGQGLEWMGYIYPYIGGSGYAQKFQGRVTMTR
DTSTSTVYMELSSLRSEDTAVYYCAREDKTARNAMDYWGQGTLVTVSSASASTKGPSVFPLAPCSRSTSEST
AALGCLVKDYFPEPVTVSWNSGALTSGVHTFPAVLQSSGLYSLSSVVTVPSSSLGTKTYTCNVDHKPSNTKV
DKRVESKYGPPCPPCPAPEFLGGPSVFLFPPKPKDTLMISRTPEVTCVVVDVSQEDPEVQFNWYVDGVEVHN
AKTKPREEQFNSTYRVVSVLTVLHQDWLNGKEYKCKVSNKGLPSSIEKTISKAKGQPREPQVCTLPPSQDEL
TKNQVSLSCAVKGFYPSDIAVEWESNGQPENNYKTTPPVLDSDGSFFLVSRLTVDKSRWQEGNVFSCSVMHE
ALHNHYTQKSLSLSPG;;
CHA.7.518.1 VH hIgG4 Fc Y354C E356D M348L T366W Knob
(SEQ ID NO: 3307)
QVQLVQSGAEVKKPGASVKVSCKASGYTFTDYNINWVRQAPGQGLEWMGYIYPYIGGSGYAQKFQGRVTMTR
DTSTSTVYMELSSLRSEDTAVYYCAREDKTARNAMDYWGQGTLVTVSSASASTKGPSVFPLAPCSRSTSEST
AALGCLVKDYFPEPVTVSWNSGALTSGVHTFPAVLQSSGLYSLSSVVTVPSSSLGTKTYTCNVDHKPSNTKV
DKRVESKYGPPCPPCPAPEFLGGPSVFLFPPKPKDTLMISRTPEVTCVVVDVSQEDPEVQFNWYVDGVEVHN
AKTKPREEQFNSTYRVVSVLTVLHQDWLNGKEYKCKVSNKGLPSSIEKTISKAKGQPREPQVYTLPPCQDEL
TKNQVSLWCLVKGFYPSDIAVEWESNGQPENNYKTTPPVLDSDGSFFLYSRLTVDKSRWQEGNVFSCSVMHE
ALHNHYTQKSLSLSPG;;
CHA.7.518.4 scFv (VL-linker-VH) hIgG4 Variant 1
(SEQ ID NO: 3317)
DIQMTQSPSSLSASVGDRVTITCRVSENIYDVLAWYQQKPGKAPKLLIYEATNLAEGVPSRFSGSGSGTDFT
LTISSLQPEDFATYYCQHFWGTPYTFGQGTKLEIKggggsggggsggggsQVQLVQSGAEVKKPGASVKVSC
KASGYTFTDYNINWVRQAPGQGLEWMGYIYPYIGGSGYAQKFQGRVTMTRDTSTSTVYMELSSLRSEDTAVY
YCAREDKTARNAMDYWGQGTLVTVSSESKYGPPCPPCPAPPVA()GPSVFLFPPKPKDTLMISRTPEVTCVV
VDVKQEDPEVQFNWYVDGVEVHNAKTKPREEQFNSTYRVVSVLTVLHQDWLNGKEYKCKVSNKGLPSSIEKT
ISKAKGQPREPQVYTLPPSQEQMTKNQVKLTCLVKGFYPSDIAVEWESNGQPENNYKTTPPVLDSDGSFFLY
SRLTVDKSRWQEGNVFSCSVMHEALHNHYTQKSLSLSPG;
CHA.7.518.4 scFv (VH-linker-VL) hIgG4 Variant 1
(SEQ ID NO: 3327)
QVQLVQSGAEVKKPGASVKVSCKASGYTFTDYNINWVRQAPGQGLEWMGYIYPYIGGSGYAQKFQGRVTMTR
DTSTSTVYMELSSLRSEDTAVYYCAREDKTARNAMDYWGQGTLVTVSSggggsggggsggggsDIQMTQSPS
SLSASVGDRVTITCRVSENIYDVLAWYQQKPGKAPKLLIYEATNLAEGVPSRFSGSGSGTDFTLTISSLQPE
DFATYYCQHFWGTPYTFGQGTKLEIKESKYGPPCPPCPAPPVA()GPSVFLFPPKPKDTLMISRTPEVTCVV
VDVKQEDPEVQFNWYVDGVEVHNAKTKPREEQFNSTYRVVSVLTVLHQDWLNGKEYKCKVSNKGLPSSIEKT
ISKAKGQPREPQVYTLPPSQEQMTKNQVKLTCLVKGFYPSDIAVEWESNGQPENNYKTTPPVLDSDGSFFLY
SRLTVDKSRWQEGNVFSCSVMHEALHNHYTQKSLSLSPG;
CHA.7.518.4 scFv (VL-linker-VH) hIgG4 Variant 2
(SEQ ID NO: 3337)
DIQMTQSPSSLSASVGDRVTITCRVSENIYDVLAWYQQKPGKAPKLLIYEATNLAEGVPSRFSGSGSGTDFT
LTISSLQPEDFATYYCQHFWGTPYTFGQGTKLEIKggggsggggsggggsQVQLVQSGAEVKKPGASVKVSC
KASGYTFTDYNINWVRQAPGQGLEWMGYIYPYIGGSGYAQKFQGRVTMTRDTSTSTVYMELSSLRSEDTAVY
YCAREDKTARNAMDYWGQGTLVTVSSESKYGPPCPPCPAPPVA()GPSVFLFPPKPKDTLMISRTPEVTCVV
VDVKQEDPEVQFNWYVDGVEVHNAKTKPREEEFNSTYRVVSVLTVLHQDWLNGKEYKCKVSNKGLPSSIEKT
ISKAKGQPREPQVYTLPPSQEEMTKNQVSLTCDVSGFYPSDIAVEWESDGQPENNYKTTPPVLDSDGSFFLY
SRLTVDKSRWEEGDVFSCSVMHEALHNHYTQKSLSLSPG;
CHA.7.518.4 scFv (VH-linker-VL) hIgG4 Variant 2
(SEQ ID NO: 3347)
QVQLVQSGAEVKKPGASVKVSCKASGYTFTDYNINWVRQAPGQGLEWMGYIYPYIGGSGYAQKFQGRVTMTR
DTSTSTVYMELSSLRSEDTAVYYCAREDKTARNAMDYWGQGTLVTVSSggggsggggsggggsDIQMTQSPS
SLSASVGDRVTITCRVSENIYDVLAWYQQKPGKAPKLLIYEATNLAEGVPSRFSGSGSGTDFTLTISSLQPE
DFATYYCQHFWGTPYTFGQGTKLEIKESKYGPPCPPCPAPPVA()GPSVFLFPPKPKDTLMISRTPEVTCVV
VDVKQEDPEVQFNWYVDGVEVHNAKTKPREEEFNSTYRVVSVLTVLHQDWLNGKEYKCKVSNKGLPSSIEKT
ISKAKGQPREPQVYTLPPSQEEMTKNQVSLTCDVSGFYPSDIAVEWESDGQPENNYKTTPPVLDSDGSFFLY
SRLTVDKSRWEEGDVFSCSVMHEALHNHYTQKSLSLSPG;
CHA.7.518.4 hIgG4 Variant 1
(SEQ ID NO: 3357)
QVQLVQSGAEVKKPGASVKVSCKASGYTFTDYNINWVRQAPGQGLEWMGYIYPYIGGSGYAQKFQGRVTMTR
DTSTSTVYMELSSLRSEDTAVYYCAREDKTARNAMDYWGQGTLVTVSSASTKGPSVFPLAPCSRSTSESTAA
LGCLVKDYFPEPVTVSWNSGALTSGVHTFPAVLQSSGLYSLSSVVTVPSSSLGTKTYTCNVDHKPSNTKVDK
RVESKYGPPCPPCPAPPVA()GPSVFLFPPKPKDTLMISRTPEVTCVVVDVKQEDPEVQFNWYVDGVEVHNA
KTKPREEQFNSTYRVVSVLTVLHQDWLNGKEYKCKVSNKGLPSSIEKTISKAKGQPREPQVYTLPPSQEQMT
KNQVKLTCLVKGFYPSDIAVEWESNGQPENNYKTTPPVLDSDGSFFLYSRLTVDKSRWQEGNVFSCSVMHEA
LHNHYTQKSLSLSPG;
CHA.7.518.4 hIgG4 Variant 2
(SEQ ID NO: 3367)
QVQLVQSGAEVKKPGASVKVSCKASGYTFTDYNINWVRQAPGQGLEWMGYIYPYIGGSGYAQKFQGRVTMTR
DTSTSTVYMELSSLRSEDTAVYYCAREDKTARNAMDYWGQGTLVTVSSASTKGPSVFPLAPCSRSTSESTAA
LGCLVKDYFPEPVTVSWNSGALTSGVHTFPAVLQSSGLYSLSSVVTVPSSSLGTKTYTCNVDHKPSDTKVDK
RVESKYGPPCPPCPAPPVA()GPSVFLFPPKPKDTLMISRTPEVTCVVVDVKQEDPEVQFNWYVDGVEVHNA
KTKPREEEFNSTYRVVSVLTVLHQDWLNGKEYKCKVSNKGLPSSIEKTISKAKGQPREPQVYTLPPSQEEMT
KNQVSLTCDVSGFYPSDIAVEWESDGQPENNYKTTPPVLDSDGSFFLYSRLTVDKSRWEEGDVFSCSVMHEA
LHNHYTQKSLSLSPG;
CHA.7.518.4 VH Clambda-VL-CH1 Crossmab hIgG4 Fc Y349C E356D L358L T366S
L368A Y407V Hole
(SEQ ID NO: 3651)
QVQLVQSGAEVKKPGASVKVSCKASGYTFTDYNINWVRQAPGQGLEWMGYIYPYIGGSGYAQKFQGRVTMTR
DTSTSTVYMELSSLRSEDTAVYYCAREDKTARNAMDYWGQGTLVTVSSASVAAPSVFIFPPSDEQLKSGTAS
VVCLLNNFYPREAKVQWKVDNALQSGNSQESVTEQDSKDSTYSLSSTLTLSKADYEKHKVYACEVTHQGLSS
PVTKSFNRGECESKYGPPCPPCPAPEFLGGPSVFLFPPKPKDTLMISRTPEVTCVVVDVSQEDPEVQFNWYV
DGVEVHNAKTKPREEQFNSTYRVVSVLTVLHQDWLNGKEYKCKVSNKGLPSSIEKTISKAKGQPREPQVCTL
PPSQDELTKNQVSLSCAVKGFYPSDIAVEWESNGQPENNYKTTPPVLDSDGSFFLVSRLTVDKSRWQEGNVF
SCSVMHEALHNHYTQKSLSLSPG;
CHA.7.518.4 VH Clambda-VL-CH1 Crossmab hIgG4 Fc Y354C E356D M348L T366W
Knob
(SEQ ID NO: 3652)
QVQLVQSGAEVKKPGASVKVSCKASGYTFTDYNINWVRQAPGQGLEWMGYIYPYIGGSGYAQKFQGRVTMTR
DTSTSTVYMELSSLRSEDTAVYYCAREDKTARNAMDYWGQGTLVTVSSASVAAPSVFIFPPSDEQLKSGTAS
VVCLLNNFYPREAKVQWKVDNALQSGNSQESVTEQDSKDSTYSLSSTLTLSKADYEKHKVYACEVTHQGLSS
PVTKSFNRGECESKYGPPCPPCPAPEFLGGPSVFLFPPKPKDTLMISRTPEVTCVVVDVSQEDPEVQFNWYV
DGVEVHNAKTKPREEQFNSTYRVVSVLTVLHQDWLNGKEYKCKVSNKGLPSSIEKTISKAKGQPREPQVYTL
PPCQDELTKNQVSLWCLVKGFYPSDIAVEWESNGQPENNYKTTPPVLDSDGSFFLYSRLTVDKSRWQEGNVF
SCSVMHEALHNHYTQKSLSLSPG;
CHA.7.518.4 VH hIgG4 Fc Y349C E356D L358L T366S L368A Y407V Hole
(SEQ ID NO: 3397)
QVQLVQSGAEVKKPGASVKVSCKASGYTFTDYNINWVRQAPGQGLEWMGYIYPYIGGSGYAQKFQGRVTMTR
DTSTSTVYMELSSLRSEDTAVYYCAREDKTARNAMDYWGQGTLVTVSSASASTKGPSVFPLAPCSRSTSEST
AALGCLVKDYFPEPVTVSWNSGALTSGVHTFPAVLQSSGLYSLSSVVTVPSSSLGTKTYTCNVDHKPSNTKV
DKRVESKYGPPCPPCPAPEFLGGPSVFLFPPKPKDTLMISRTPEVTCVVVDVSQEDPEVQFNWYVDGVEVHN
AKTKPREEQFNSTYRVVSVLTVLHQDWLNGKEYKCKVSNKGLPSSIEKTISKAKGQPREPQVCTLPPSQDEL
TKNQVSLSCAVKGFYPSDIAVEWESNGQPENNYKTTPPVLDSDGSFFLVSRLTVDKSRWQEGNVFSCSVMHE
ALHNHYTQKSLSLSPG;
or
CHA.7.518.4 VH hIgG4 Fc Y354C E356D M348L T366W Knob
(SEQ ID NO: 3407)
QVQLVQSGAEVKKPGASVKVSCKASGYTFTDYNINWVRQAPGQGLEWMGYIYPYIGGSGYAQKFQGRVTMTR
DTSTSTVYMELSSLRSEDTAVYYCAREDKTARNAMDYWGQGTLVTVSSASASTKGPSVFPLAPCSRSTSEST
AALGCLVKDYFPEPVTVSWNSGALTSGVHTFPAVLQSSGLYSLSSVVTVPSSSLGTKTYTCNVDHKPSNTKV
DKRVESKYGPPCPPCPAPEFLGGPSVFLFPPKPKDTLMISRTPEVTCVVVDVSQEDPEVQFNWYVDGVEVHN
AKTKPREEQFNSTYRVVSVLTVLHQDWLNGKEYKCKVSNKGLPSSIEKTISKAKGQPREPQVYTLPPCQDEL
TKNQVSLWCLVKGFYPSDIAVEWESNGQPENNYKTTPPVLDSDGSFFLYSRLTVDKSRWQEGNVFSCSVMHE
ALHNHYTQKSLSLSPG.

[0504] In some embodiments, the anti-TIGIT portion of the anti-PVRIG/anti-TIGIT bispecific antibody comprises one of the following anti-PVRIG sequences:

CPA.9.086 scFv (VL-linker-VH) hIgG4 Variant 1
(SEQ ID NO: 3417)
QSALTQPRSASGNPGQRVTISCSGSSSNMGRRPVNWYQQIPGTAPKLLIYSQNQRPSGVPDRFSGSQSGTSA
SLTISGLQSEDEAEYFCAVWDDIGRVLQLGGGTQLAVLggggsggggsggggsEVQLVETGGGLIQPGRSLR
LSCAASGFTFSSYAMHWVRQAPGKGLEWVAVISYAGEVKYYADSVKGRFTISRDNSKNTLYLQMNSLRAEDT
AVYYCARDPLPLHYYGMDVWGQGTTVTVSSESKYGPPCPPCPAPPVA()GPSVFLFPPKPKDTLMISRTPEV
TCVVVDVKQEDPEVQFNWYVDGVEVHNAKTKPREEQFNSTYRVVSVLTVLHQDWLNGKEYKCKVSNKGLPSS
IEKTISKAKGQPREPQVYTLPPSQEQMTKNQVKLTCLVKGFYPSDIAVEWESNGQPENNYKTTPPVLDSDGS
FFLYSRLTVDKSRWQEGNVFSCSVMHEALHNHYTQKSLSLSPG;
CPA.9.086 scFv (VH-linker-VL) hIgG4 Variant 1
(SEQ ID NO: 3427)
EVQLVETGGGLIQPGRSLRLSCAASGFTFSSYAMHWVRQAPGKGLEWVAVISYAGEVKYYADSVKGRFTISR
DNSKNTLYLQMNSLRAEDTAVYYCARDPLPLHYYGMDVWGQGTTVTVSSggggsggggsggggsQSALTQPR
SASGNPGQRVTISCSGSSSNMGRRPVNWYQQIPGTAPKLLIYSQNQRPSGVPDRFSGSQSGTSASLTISGLQ
SEDEAEYFCAVWDDIGRVLQLGGGTQLAVLESKYGPPCPPCPAPPVA()GPSVFLFPPKPKDTLMISRTPEV
TCVVVDVKQEDPEVQFNWYVDGVEVHNAKTKPREEQFNSTYRVVSVLTVLHQDWLNGKEYKCKVSNKGLPSS
IEKTISKAKGQPREPQVYTLPPSQEQMTKNQVKLTCLVKGFYPSDIAVEWESNGQPENNYKTTPPVLDSDGS
FFLYSRLTVDKSRWQEGNVFSCSVMHEALHNHYTQKSLSLSPG;
CPA.9.086 scFv (VL-linker-VH) hIgG4 Variant 2
(SEQ ID NO: 3437)
QSALTQPRSASGNPGQRVTISCSGSSSNMGRRPVNWYQQIPGTAPKLLIYSQNQRPSGVPDRFSGSQSGTSA
SLTISGLQSEDEAEYFCAVWDDIGRVLQLGGGTQLAVLggggsggggsggggsEVQLVETGGGLIQPGRSLR
LSCAASGFTFSSYAMHWVRQAPGKGLEWVAVISYAGEVKYYADSVKGRFTISRDNSKNTLYLQMNSLRAEDT
AVYYCARDPLPLHYYGMDVWGQGTTVTVSSESKYGPPCPPCPAPPVA()GPSVFLFPPKPKDTLMISRTPEV
TCVVVDVKQEDPEVQFNWYVDGVEVHNAKTKPREEEFNSTYRVVSVLTVLHQDWLNGKEYKCKVSNKGLPSS
IEKTISKAKGQPREPQVYTLPPSQEEMTKNQVSLTCDVSGFYPSDIAVEWESDGQPENNYKTTPPVLDSDGS
FFLYSRLTVDKSRWEEGDVFSCSVMHEALHNHYTQKSLSLSPG;
CPA.9.086 scFv (VH-linker-VL) hIgG4 Variant 2
(SEQ ID NO: 3447)
EVQLVETGGGLIQPGRSLRLSCAASGFTFSSYAMHWVRQAPGKGLEWVAVISYAGEVKYYADSVKGRFTISR
DNSKNTLYLQMNSLRAEDTAVYYCARDPLPLHYYGMDVWGQGTTVTVSSggggsggggsggggsQSALTQPR
SASGNPGQRVTISCSGSSSNMGRRPVNWYQQIPGTAPKLLIYSQNQRPSGVPDRFSGSQSGTSASLTISGLQ
SEDEAEYFCAVWDDIGRVLQLGGGTQLAVLESKYGPPCPPCPAPPVA()GPSVFLFPPKPKDTLMISRTPEV
TCVVVDVKQEDPEVQFNWYVDGVEVHNAKTKPREEEFNSTYRVVSVLTVLHQDWLNGKEYKCKVSNKGLPSS
IEKTISKAKGQPREPQVYTLPPSQEEMTKNQVSLTCDVSGFYPSDIAVEWESDGQPENNYKTTPPVLDSDGS
FFLYSRLTVDKSRWEEGDVFSCSVMHEALHNHYTQKSLSLSPG;
CPA.9.086 hIgG4 Variant 1
(SEQ ID NO: 3457)
EVQLVETGGGLIQPGRSLRLSCAASGFTFSSYAMHWVRQAPGKGLEWVAVISYAGEVKYYADSVKGRFTISR
DNSKNTLYLQMNSLRAEDTAVYYCARDPLPLHYYGMDVWGQGTTVTVSSASTKGPSVFPLAPCSRSTSESTA
ALGCLVKDYFPEPVTVSWNSGALTSGVHTFPAVLQSSGLYSLSSVVTVPSSSLGTKTYTCNVDHKPSDTKVD
KRVESKYGPPCPPCPAPPVA()GPSVFLFPPKPKDTLMISRTPEVTCVVVDVKQEDPEVQFNWYVDGVEVHN
AKTKPREEQFNSTYRVVSVLTVLHQDWLNGKEYKCKVSNKGLPSSIEKTISKAKGQPREPQVYTLPPSQEQM
TKNQVKLTCLVKGFYPSDIAVEWESNGQPENNYKTTPPVLDSDGSFFLYSRLTVDKSRWQEGNVFSCSVMHE
ALHNHYTQKSLSLSPG;
CPA.9.086 hIgG4 Variant 2
(SEQ ID NO: 3467)
EVQLVETGGGLIQPGRSLRLSCAASGFTFSSYAMHWVRQAPGKGLEWVAVISYAGEVKYYADSVKGRFTISR
DNSKNTLYLQMNSLRAEDTAVYYCARDPLPLHYYGMDVWGQGTTVTVSSASTKGPSVFPLAPCSRSTSESTA
ALGCLVKDYFPEPVTVSWNSGALTSGVHTFPAVLQSSGLYSLSSVVTVPSSSLGTKTYTCNVDHKPSDTKVD
KRVESKYGPPCPPCPAPPVA()GPSVFLFPPKPKDTLMISRTPEVTCVVVDVKQEDPEVQFNWYVDGVEVHN
AKTKPREEEFNSTYRVVSVLTVLHQDWLNGKEYKCKVSNKGLPSSIEKTISKAKGQPREPQVYTLPPSQEEM
TKNQVSLTCDVSGFYPSDIAVEWESDGQPENNYKTTPPVLDSDGSFFLYSRLTVDKSRWEEGDVFSCSVMHE
ALHNHYTQKSLSLSPG;
CPA.9.086 VH Clambda-VL-CH1 Crossmab hIgG4 Fc Y349C E356D L358L T366S
L368A Y407V Hole
(SEQ ID NO: 3477)
EVQLVETGGGLIQPGRSLRLSCAASGFTFSSYAMHWVRQAPGKGLEWVAVISYAGEVKYYADSVKGRFTISR
DNSKNTLYLQMNSLRAEDTAVYYCARDPLPLHYYGMDVWGQGTTVTVSSASGQPKAAPSVTLFPPSSEELQA
NKATLVCLISDFYPGAVTVAWKADSSPVKAGVETTTPSKQSNNKYAASSYLSLTPEQWKSHRSYSCQVTHEG
STVEKTVAPTECSESKYGPPCPPCPAPEFLGGPSVFLFPPKPKDTLMISRTPEVTCVVVDVSQEDPEVQFNW
YVDGVEVHNAKTKPREEQFNSTYRVVSVLTVLHQDWLNGKEYKCKVSNKGLPSSIEKTISKAKGQPREPQVC
TLPPSQDELTKNQVSLSCAVKGFYPSDIAVEWESNGQPENNYKTTPPVLDSDGSFFLVSRLTVDKSRWQEGN
VFSCSVMHEALHNHYTQKSLSLSPG;
CPA.9.086 VH Clambda-VL-CH1 Crossmab hIgG4 Fc Y354C E356D M348L T366W
Knob
(SEQ ID NO: 3487)
EVQLVETGGGLIQPGRSLRLSCAASGFTFSSYAMHWVRQAPGKGLEWVAVISYAGEVKYYADSVKGRFTISR
DNSKNTLYLQMNSLRAEDTAVYYCARDPLPLHYYGMDVWGQGTTVTVSSASGQPKAAPSVTLFPPSSEELQA
NKATLVCLISDFYPGAVTVAWKADSSPVKAGVETTTPSKQSNNKYAASSYLSLTPEQWKSHRSYSCQVTHEG
STVEKTVAPTECSESKYGPPCPPCPAPEFLGGPSVFLFPPKPKDTLMISRTPEVTCVVVDVSQEDPEVQFNW
YVDGVEVHNAKTKPREEQFNSTYRVVSVLTVLHQDWLNGKEYKCKVSNKGLPSSIEKTISKAKGQPREPQVY
TLPPCQDELTKNQVSLWCLVKGFYPSDIAVEWESNGQPENNYKTTPPVLDSDGSFFLYSRLTVDKSRWQEGN
VFSCSVMHEALHNHYTQKSLSLSPG;
CPA.9.086 VH hIgG4 Fc Y349C E356D L358L T366S L368A Y407V Hole
(SEQ ID NO: 3497)
EVQLVETGGGLIQPGRSLRLSCAASGFTFSSYAMHWVRQAPGKGLEWVAVISYAGEVKYYADSVKGRFTISR
DNSKNTLYLQMNSLRAEDTAVYYCARDPLPLHYYGMDVWGQGTTVTVSSASASTKGPSVFPLAPCSRSTSES
TAALGCLVKDYFPEPVTVSWNSGALTSGVHTFPAVLQSSGLYSLSSVVTVPSSSLGTKTYTCNVDHKPSNTK
VDKRVESKYGPPCPPCPAPEFLGGPSVFLFPPKPKDTLMISRTPEVTCVVVDVSQEDPEVQFNWYVDGVEVH
NAKTKPREEQFNSTYRVVSVLTVLHQDWLNGKEYKCKVSNKGLPSSIEKTISKAKGQPREPQVCTLPPSQDE
LTKNQVSLSCAVKGFYPSDIAVEWESNGQPENNYKTTPPVLDSDGSFFLVSRLTVDKSRWQEGNVFSCSVMH
EALHNHYTQKSLSLSPG;
CPA.9.086 VH hIgG4 Fc Y354C E356D M348L T366W Knob
(SEQ ID NO: 3507)
EVQLVETGGGLIQPGRSLRLSCAASGFTFSSYAMHWVRQAPGKGLEWVAVISYAGEVKYYADSVKGRFTISR
DNSKNTLYLQMNSLRAEDTAVYYCARDPLPLHYYGMDVWGQGTTVTVSSASASTKGPSVFPLAPCSRSTSES
TAALGCLVKDYFPEPVTVSWNSGALTSGVHTFPAVLQSSGLYSLSSVVTVPSSSLGTKTYTCNVDHKPSNTK
VDKRVESKYGPPCPPCPAPEFLGGPSVFLFPPKPKDTLMISRTPEVTCVVVDVSQEDPEVQFNWYVDGVEVH
NAKTKPREEQFNSTYRVVSVLTVLHQDWLNGKEYKCKVSNKGLPSSIEKTISKAKGQPREPQVYTLPPCQDE
LTKNQVSLWCLVKGFYPSDIAVEWESNGQPENNYKTTPPVLDSDGSFFLYSRLTVDKSRWQEGNVFSCSVMH
EALHNHYTQKSLSLSPG;
CHA.9.547.18 scFv (VL-linker-VH) hIgG4 Variant 1
(SEQ ID NO: 3517)
DIQMTQSPSSLSASVGDRITITCRASQSMAIWLSWYQQKPGKAPKLLIYKASKSHTGVPSRFSGSGSGTDFT
LTISSLQPEDFATYYCQQGQSYPYTFGQGTKLEIKggggsggggsggggsEVQLVESGGGLVQPGGSLRLSC
AASGFTFSSYIMSWVRQAPGKGLEWVATISGGSKGQYYADSVKGRFTISRDNSKNTLYLQMNSLRAEDTAVY
YCAKWLLSYYAMDYWGQGTLVTVSSESKYGPPCPPCPAPPVA()GPSVFLFPPKPKDTLMISRTPEVTCVVV
DVKQEDPEVQFNWYVDGVEVHNAKTKPREEQFNSTYRVVSVLTVLHQDWLNGKEYKCKVSNKGLPSSIEKTI
SKAKGQPREPQVYTLPPSQEQMTKNQVKLTCLVKGFYPSDIAVEWESNGQPENNYKTTPPVLDSDGSFFLYS
RLTVDKSRWQEGNVFSCSVMHEALHNHYTQKSLSLSPG;
CHA.9.547.18 scFv (VH-linker-VL) hIgG4 Variant 1
(SEQ ID NO: 3527)
EVQLVESGGGLVQPGGSLRLSCAASGFTFSSYIMSWVRQAPGKGLEWVATISGGSKGQYYADSVKGRFTISR
DNSKNTLYLQMNSLRAEDTAVYYCAKWLLSYYAMDYWGQGTLVTVSSggggsggggsggggsDIQMTQSPSS
LSASVGDRITITCRASQSMAIWLSWYQQKPGKAPKLLIYKASKSHTGVPSRFSGSGSGTDFTLTISSLQPED
FATYYCQQGQSYPYTFGQGTKLEIKESKYGPPCPPCPAPPVA()GPSVFLFPPKPKDTLMISRTPEVTCVVV
DVKQEDPEVQFNWYVDGVEVHNAKTKPREEQFNSTYRVVSVLTVLHQDWLNGKEYKCKVSNKGLPSSIEKTI
SKAKGQPREPQVYTLPPSQEQMTKNQVKLTCLVKGFYPSDIAVEWESNGQPENNYKTTPPVLDSDGSFFLYS
RLTVDKSRWQEGNVFSCSVMHEALHNHYTQKSLSLSPG;
CHA.9.547.18 scFv (VL-linker-VH) hIgG4 Variant 2
(SEQ ID NO: 3537)
DIQMTQSPSSLSASVGDRITITCRASQSMAIWLSWYQQKPGKAPKLLIYKASKSHTGVPSRFSGSGSGTDFT
LTISSLQPEDFATYYCQQGQSYPYTFGQGTKLEIKggggsggggsggggsEVQLVESGGGLVQPGGSLRLSC
AASGFTFSSYIMSWVRQAPGKGLEWVATISGGSKGQYYADSVKGRFTISRDNSKNTLYLQMNSLRAEDTAVY
YCAKWLLSYYAMDYWGQGTLVTVSSESKYGPPCPPCPAPPVA()GPSVFLFPPKPKDTLMISRTPEVTCVVV
DVKQEDPEVQFNWYVDGVEVHNAKTKPREEEFNSTYRVVSVLTVLHQDWLNGKEYKCKVSNKGLPSSIEKTI
SKAKGQPREPQVYTLPPSQEEMTKNQVSLTCDVSGFYPSDIAVEWESDGQPENNYKTTPPVLDSDGSFFLYS
RLTVDKSRWEEGDVFSCSVMHEALHNHYTQKSLSLSPG;
CHA.9.547.18 scFv (VH-linker-VL) hIgG4 Variant 2
(SEQ ID NO: 3547)
EVQLVESGGGLVQPGGSLRLSCAASGFTFSSYIMSWVRQAPGKGLEWVATISGGSKGQYYADSVKGRFTISR
DNSKNTLYLQMNSLRAEDTAVYYCAKWLLSYYAMDYWGQGTLVTVSSggggsggggsggggsDIQMTQSPSS
LSASVGDRITITCRASQSMAIWLSWYQQKPGKAPKLLIYKASKSHTGVPSRFSGSGSGTDFTLTISSLQPED
FATYYCQQGQSYPYTFGQGTKLEIKESKYGPPCPPCPAPPVA()GPSVFLFPPKPKDTLMISRTPEVTCVVV
DVKQEDPEVQFNWYVDGVEVHNAKTKPREEEFNSTYRVVSVLTVLHQDWLNGKEYKCKVSNKGLPSSIEKTI
SKAKGQPREPQVYTLPPSQEEMTKNQVSLTCDVSGFYPSDIAVEWESDGQPENNYKTTPPVLDSDGSFFLYS
RLTVDKSRWEEGDVFSCSVMHEALHNHYTQKSLSLSPG;
CHA.9.547.18 hIgG4 Variant 1
(SEQ ID NO: 3557)
EVQLVESGGGLVQPGGSLRLSCAASGFTFSSYIMSWVRQAPGKGLEWVATISGGSKGQYYADSVKGRFTISR
DNSKNTLYLQMNSLRAEDTAVYYCAKWLLSYYAMDYWGQGTLVTVSSASTKGPSVFPLAPCSRSTSESTAAL
GCLVKDYFPEPVTVSWNSGALTSGVHTFPAVLQSSGLYSLSSVVTVPSSSLGTKTYTCNVDHKPSNTKVDKR
VESKYGPPCPPCPAPPVA()GPSVFLFPPKPKDTLMISRTPEVTCVVVDVKQEDPEVQFNWYVDGVEVHNAK
TKPREEQFNSTYRVVSVLTVLHQDWLNGKEYKCKVSNKGLPSSIEKTISKAKGQPREPQVYTLPPSQEQMTK
NQVKLTCLVKGFYPSDIAVEWESNGQPENNYKTTPPVLDSDGSFFLYSRLTVDKSRWQEGNVFSCSVMHEAL
HNHYTQKSLSLSPG;
CHA.9.547.18 hIgG4 Variant 2
(SEQ ID NO: 3567)
EVQLVESGGGLVQPGGSLRLSCAASGFTFSSYIMSWVRQAPGKGLEWVATISGGSKGQYYADSVKGRFTISR
DNSKNTLYLQMNSLRAEDTAVYYCAKWLLSYYAMDYWGQGTLVTVSSASTKGPSVFPLAPCSRSTSESTAAL
GCLVKDYFPEPVTVSWNSGALTSGVHTFPAVLQSSGLYSLSSVVTVPSSSLGTKTYTCNVDHKPSDTKVDKR
VESKYGPPCPPCPAPPVA()GPSVFLFPPKPKDTLMISRTPEVTCVVVDVKQEDPEVQFNWYVDGVEVHNAK
TKPREEEFNSTYRVVSVLTVLHQDWLNGKEYKCKVSNKGLPSSIEKTISKAKGQPREPQVYTLPPSQEEMTK
NQVSLTCDVSGFYPSDIAVEWESDGQPENNYKTTPPVLDSDGSFFLYSRLTVDKSRWEEGDVFSCSVMHEAL
HNHYTQKSLSLSPG;
CHA.9.547.18 VH Clambda-VL-CH1 Crossmab hIgG4 Fc Y349C E356D L358L
T366S L368A Y407V Hole
(SEQ ID NO: 3653)
EVQLVESGGGLVQPGGSLRLSCAASGFTFSSYIMSWVRQAPGKGLEWVATISGGSKGQYYADSVKGRFTISR
DNSKNTLYLQMNSLRAEDTAVYYCAKWLLSYYAMDYWGQGTLVTVSSASVAAPSVFIFPPSDEQLKSGTASV
VCLLNNFYPREAKVQWKVDNALQSGNSQESVTEQDSKDSTYSLSSTLTLSKADYEKHKVYACEVTHQGLSSP
VTKSFNRGECESKYGPPCPPCPAPEFLGGPSVFLFPPKPKDTLMISRTPEVTCVVVDVSQEDPEVQFNWYVD
GVEVHNAKTKPREEQFNSTYRVVSVLTVLHQDWLNGKEYKCKVSNKGLPSSIEKTISKAKGQPREPQVCTLP
PSQDELTKNQVSLSCAVKGFYPSDIAVEWESNGQPENNYKTTPPVLDSDGSFFLVSRLTVDKSRWQEGNVFS
CSVMHEALHNHYTQKSLSLSPG;
CHA.9.547.18 VH Clambda-VL-CH1 Crossmab hIgG4 Fc Y354C E356D M348L
T366W Knob
(SEQ ID NO: 3654)
EVQLVESGGGLVQPGGSLRLSCAASGFTFSSYIMSWVRQAPGKGLEWVATISGGSKGQYYADSVKGRFTISR
DNSKNTLYLQMNSLRAEDTAVYYCAKWLLSYYAMDYWGQGTLVTVSSASVAAPSVFIFPPSDEQLKSGTASV
VCLLNNFYPREAKVQWKVDNALQSGNSQESVTEQDSKDSTYSLSSTLTLSKADYEKHKVYACEVTHQGLSSP
VTKSFNRGECESKYGPPCPPCPAPEFLGGPSVFLFPPKPKDTLMISRTPEVTCVVVDVSQEDPEVQFNWYVD
GVEVHNAKTKPREEQFNSTYRVVSVLTVLHQDWLNGKEYKCKVSNKGLPSSIEKTISKAKGQPREPQVYTLP
PCQDELTKNQVSLWCLVKGFYPSDIAVEWESNGQPENNYKTTPPVLDSDGSFFLYSRLTVDKSRWQEGNVFS
CSVMHEALHNHYTQKSLSLSPG;
CHA.9.547.18 VH hIgG4 Fc Y349C E356D L358L T366S L368A Y407V Hole
(SEQ ID NO: 3597)
EVQLVESGGGLVQPGGSLRLSCAASGFTFSSYIMSWVRQAPGKGLEWVATISGGSKGQYYADSVKGRFTISR
DNSKNTLYLQMNSLRAEDTAVYYCAKWLLSYYAMDYWGQGTLVTVSSASASTKGPSVFPLAPCSRSTSESTA
ALGCLVKDYFPEPVTVSWNSGALTSGVHTFPAVLQSSGLYSLSSVVTVPSSSLGTKTYTCNVDHKPSNTKVD
KRVESKYGPPCPPCPAPEFLGGPSVFLFPPKPKDTLMISRTPEVTCVVVDVSQEDPEVQFNWYVDGVEVHNA
KTKPREEQFNSTYRVVSVLTVLHQDWLNGKEYKCKVSNKGLPSSIEKTISKAKGQPREPQVCTLPPSQDELT
KNQVSLSCAVKGFYPSDIAVEWESNGQPENNYKTTPPVLDSDGSFFLVSRLTVDKSRWQEGNVFSCSVMHEA
LHNHYTQKSLSLSPG;
or
CHA.9.547.18 VH hIgG4 Fc Y354C E356D M348L T366W Knob
(SEQ ID NO: 3607)
EVQLVESGGGLVQPGGSLRLSCAASGFTFSSYIMSWVRQAPGKGLEWVATISGGSKGQYYADSVKGRFTISR
DNSKNTLYLQMNSLRAEDTAVYYCAKWLLSYYAMDYWGQGTLVTVSSASASTKGPSVFPLAPCSRSTSESTA
ALGCLVKDYFPEPVTVSWNSGALTSGVHTFPAVLQSSGLYSLSSVVTVPSSSLGTKTYTCNVDHKPSNTKVD
KRVESKYGPPCPPCPAPEFLGGPSVFLFPPKPKDTLMISRTPEVTCVVVDVSQEDPEVQFNWYVDGVEVHNA
KTKPREEQFNSTYRVVSVLTVLHQDWLNGKEYKCKVSNKGLPSSIEKTISKAKGQPREPQVYTLPPCQDELT
KNQVSLWCLVKGFYPSDIAVEWESNGQPENNYKTTPPVLDSDGSFFLYSRLTVDKSRWQEGNVFSCSVMHEA
LHNHYTQKSLSLSPG.

[0505] In some embodiments, the anti-PVRIG portion of the anti-PVRIG/anti-TIGIT bispecific antibody comprises the following anti-PVRIG sequence

CHA.7.518.1 scFv (VL-linker-VH) hIgG4 Variant 1

(SEQ ID NO: 3217)

DIQMTQSPSSLSASVGDRVTITCRVSENIYSNLAWYQQKPGKAPKLLIYE
ATNLAEGVPSRFSGSGSGTDFTLTISSLQPEDFATYYCQHFWGTPYTFGQ
GTKLEIKggggsggggsggggsQVQLVQSGAEVKKPGASVKVSCKASGYT
FTDYNINWVRQAPGQGLEWMGYIYPYIGGSGYAQKFQGRVTMTRDTSTST
VYMELSSLRSEDTAVYYCAREDKTARNAMDYWGQGTLVTVSSESKYGPPC
PPCPAPPVA()GPSVFLFPPKPKDTLMISRTPEVTCVVVDVKQEDPEVQF
NWYVDGVEVHNAKTKPREEQFNSTYRVVSVLTVLHQDWLNGKEYKCKVSN
KGLPSSIEKTISKAKGQPREPQVYTLPPSQEQMTKNQVKLTCLVKGFYPS
DIAVEWESNGQPENNYKTTPPVLDSDGSFFLYSRLTVDKSRWQEGNVFSC
SVMHEALHNHYTQKSLSLSPG;

and the anti-TIGIT portion of the anti-PVRIG/anti-TIGIT bispecific antibody comprises an anti-TIGIT sequence selected from the group consisting of the following sequences:

CPA.9.086 scFv (VL-linker-VH) hIgG4 Variant 2
(SEQ ID NO: 3437)
QSALTQPRSASGNPGQRVTISCSGSSSNMGRRPVNWYQQIPGTAPKLLIYSQNQRPSGVPDRFSGSQSGTSA
SLTISGLQSEDEAEYFCAVWDDIGRVLQLGGGTQLAVLggggsggggsggggsEVQLVETGGGLIQPGRSLR
LSCAASGFTFSSYAMHWVRQAPGKGLEWVAVISYAGEVKYYADSVKGRFTISRDNSKNTLYLQMNSLRAEDT
AVYYCARDPLPLHYYGMDVWGQGTTVTVSSESKYGPPCPPCPAPPVA()GPSVFLFPPKPKDTLMISRTPEV
TCVVVDVKQEDPEVQFNWYVDGVEVHNAKTKPREEEFNSTYRVVSVLTVLHQDWLNGKEYKCKVSNKGLPSS
IEKTISKAKGQPREPQVYTLPPSQEEMTKNQVSLTCDVSGFYPSDIAVEWESDGQPENNYKTTPPVLDSDGS
FFLYSRLTVDKSRWEEGDVFSCSVMHEALHNHYTQKSLSLSPG;
CPA.9.086 scFv (VH-linker-VL) hIgG4 Variant 2
(SEQ ID NO: 3447)
EVQLVETGGGLIQPGRSLRLSCAASGFTFSSYAMHWVRQAPGKGLEWVAVISYAGEVKYYADSVKGRFTISR
DNSKNTLYLQMNSLRAEDTAVYYCARDPLPLHYYGMDVWGQGTTVTVSSggggsggggsggggsQSALTQPR
SASGNPGQRVTISCSGSSSNMGRRPVNWYQQIPGTAPKLLIYSQNQRPSGVPDRFSGSQSGTSASLTISGLQ
SEDEAEYFCAVWDDIGRVLQLGGGTQLAVLESKYGPPCPPCPAPPVA()GPSVFLFPPKPKDTLMISRTPEV
TCVVVDVKQEDPEVQFNWYVDGVEVHNAKTKPREEEFNSTYRVVSVLTVLHQDWLNGKEYKCKVSNKGLPSS
IEKTISKAKGQPREPQVYTLPPSQEEMTKNQVSLTCDVSGFYPSDIAVEWESDGQPENNYKTTPPVLDSDGS
FFLYSRLTVDKSRWEEGDVFSCSVMHEALHNHYTQKSLSLSPG;
CPA.9.086 hIgG4 Variant 2
(SEQ ID NO: 3467)
EVQLVETGGGLIQPGRSLRLSCAASGFTFSSYAMHWVRQAPGKGLEWVAVISYAGEVKYYADSVKGRFTISR
DNSKNTLYLQMNSLRAEDTAVYYCARDPLPLHYYGMDVWGQGTTVTVSSASTKGPSVFPLAPCSRSTSESTA
ALGCLVKDYFPEPVTVSWNSGALTSGVHTFPAVLQSSGLYSLSSVVTVPSSSLGTKTYTCNVDHKPSDTKVD
KRVESKYGPPCPPCPAPPVA()GPSVFLFPPKPKDTLMISRTPEVTCVVVDVKQEDPEVQFNWYVDGVEVHN
AKTKPREEEFNSTYRVVSVLTVLHQDWLNGKEYKCKVSNKGLPSSIEKTISKAKGQPREPQVYTLPPSQEEM
TKNQVSLTCDVSGFYPSDIAVEWESDGQPENNYKTTPPVLDSDGSFFLYSRLTVDKSRWEEGDVFSCSVMHE
ALHNHYTQKSLSLSPG;
CHA.9.547.18 scFv (VL-linker-VH) hIgG4 Variant 2
(SEQ ID NO: 3537)
DIQMTQSPSSLSASVGDRITITCRASQSMAIWLSWYQQKPGKAPKLLIYKASKSHTGVPSRFSGSGSGTDFT
LTISSLQPEDFATYYCQQGQSYPYTFGQGTKLEIKggggsggggsggggsEVQLVESGGGLVQPGGSLRLSC
AASGFTFSSYIMSWVRQAPGKGLEWVATISGGSKGQYYADSVKGRFTISRDNSKNTLYLQMNSLRAEDTAVY
YCAKWLLSYYAMDYWGQGTLVTVSSESKYGPPCPPCPAPPVA()GPSVFLFPPKPKDTLMISRTPEVTCVVV
DVKQEDPEVQFNWYVDGVEVHNAKTKPREEEFNSTYRVVSVLTVLHQDWLNGKEYKCKVSNKGLPSSIEKTI
SKAKGQPREPQVYTLPPSQEEMTKNQVSLTCDVSGFYPSDIAVEWESDGQPENNYKTTPPVLDSDGSFFLYS
RLTVDKSRWEEGDVFSCSVMHEALHNHYTQKSLSLSPG;
CHA.9.547.18 scFv (VH-linker-VL) hIgG4 Variant 2
(SEQ ID NO: 3547)
EVQLVESGGGLVQPGGSLRLSCAASGFTFSSYIMSWVRQAPGKGLEWVATISGGSKGQYYADSVKGRFTISR
DNSKNTLYLQMNSLRAEDTAVYYCAKWLLSYYAMDYWGQGTLVTVSSggggsggggsggggsDIQMTQSPSS
LSASVGDRITITCRASQSMAIWLSWYQQKPGKAPKLLIYKASKSHTGVPSRFSGSGSGTDFTLTISSLQPED
FATYYCQQGQSYPYTFGQGTKLEIKESKYGPPCPPCPAPPVA()GPSVFLFPPKPKDTLMISRTPEVTCVVV
DVKQEDPEVQFNWYVDGVEVHNAKTKPREEEFNSTYRVVSVLTVLHQDWLNGKEYKCKVSNKGLPSSIEKTI
SKAKGQPREPQVYTLPPSQEEMTKNQVSLTCDVSGFYPSDIAVEWESDGQPENNYKTTPPVLDSDGSFFLYS
RLTVDKSRWEEGDVFSCSVMHEALHNHYTQKSLSLSPG;
and
CHA.9.547.18 hIgG4 Variant 2
(SEQ ID NO: 3567)
EVQLVESGGGLVQPGGSLRLSCAASGFTFSSYIMSWVRQAPGKGLEWVATISGGSKGQYYADSVKGRFTISR
DNSKNTLYLQMNSLRAEDTAVYYCAKWLLSYYAMDYWGQGTLVTVSSASTKGPSVFPLAPCSRSTSESTAAL
GCLVKDYFPEPVTVSWNSGALTSGVHTFPAVLQSSGLYSLSSVVTVPSSSLGTKTYTCNVDHKPSDTKVDKR
VESKYGPPCPPCPAPPVA()GPSVFLFPPKPKDTLMISRTPEVTCVVVDVKQEDPEVQFNWYVDGVEVHNAK
TKPREEEFNSTYRVVSVLTVLHQDWLNGKEYKCKVSNKGLPSSIEKTISKAKGQPREPQVYTLPPSQEEMTK
NQVSLTCDVSGFYPSDIAVEWESDGQPENNYKTTPPVLDSDGSFFLYSRLTVDKSRWEEGDVFSCSVMHEAL
HNHYTQKSLSLSPG.

[0506] In some embodiments, the anti-PVRIG portion of the anti-PVRIG/anti-TIGIT bispecific antibody comprises the following anti-PVRIG sequence

CHA.7.518.1 scFv (VL-linker-VH) hIgG4 Variant 1

(SEQ ID NO: 3217)

DIQMTQSPSSLSASVGDRVTITCRVSENIYSNLAWYQQKPGKAPKLLIYE
ATNLAEGVPSRFSGSGSGTDFTLTISSLQPEDFATYYCQHFWGTPYTFGQ
GTKLEIKggggsggggsggggsQVQLVQSGAEVKKPGASVKVSCKASGYT
FTDYNINWVRQAPGQGLEWMGYIYPYIGGSGYAQKFQGRVTMTRDTSTST
VYMELSSLRSEDTAVYYCAREDKTARNAMDYWGQGTLVTVSSESKYGPPC
PPCPAPPVA()GPSVFLFPPKPKDTLMISRTPEVTCVVVDVKQEDPEVQF
NWYVDGVEVHNAKTKPREEQFNSTYRVVSVLTVLHQDWLNGKEYKCKVSN
KGLPSSIEKTISKAKGQPREPQVYTLPPSQEQMTKNQVKLTCLVKGFYPS
DIAVEWESNGQPENNYKTTPPVLDSDGSFFLYSRLTVDKSRWQEGNVFSC
SVMHEALHNHYTQKSLSLSPG;

and the anti-TIGIT portion of the anti-PVRIG/anti-TIGIT bispecific antibody comprises an anti-TIGIT sequence selected from the group consisting of the following sequences:

CPA.9.086 scFv (VL-linker-VH) hIgG4 Variant 2
(SEQ ID NO: 3437)
QSALTQPRSASGNPGQRVTISCSGSSSNMGRRPVNWYQQIPGTAPKLLIYSQNQRPSGVPDRFSGSQSGTSA
SLTISGLQSEDEAEYFCAVWDDIGRVLQLGGGTQLAVLggggsggggsggggsEVQLVETGGGLIQPGRSLR
LSCAASGFTFSSYAMHWVRQAPGKGLEWVAVISYAGEVKYYADSVKGRFTISRDNSKNTLYLQMNSLRAEDT
AVYYCARDPLPLHYYGMDVWGQGTTVTVSSESKYGPPCPPCPAPPVA()GPSVFLFPPKPKDTLMISRTPEV
TCVVVDVKQEDPEVQFNWYVDGVEVHNAKTKPREEEFNSTYRVVSVLTVLHQDWLNGKEYKCKVSNKGLPSS
IEKTISKAKGQPREPQVYTLPPSQEEMTKNQVSLTCDVSGFYPSDIAVEWESDGQPENNYKTTPPVLDSDGS
FFLYSRLTVDKSRWEEGDVFSCSVMHEALHNHYTQKSLSLSPG;
CPA.9.086 scFv (VH-linker-VL) hIgG4 Variant 2
(SEQ ID NO: 3447)
EVQLVETGGGLIQPGRSLRLSCAASGFTFSSYAMHWVRQAPGKGLEWVAVISYAGEVKYYADSVKGRFTISR
DNSKNTLYLQMNSLRAEDTAVYYCARDPLPLHYYGMDVWGQGTTVTVSSggggsggggsggggsQSALTQPR
SASGNPGQRVTISCSGSSSNMGRRPVNWYQQIPGTAPKLLIYSQNQRPSGVPDRFSGSQSGTSASLTISGLQ
SEDEAEYFCAVWDDIGRVLQLGGGTQLAVLESKYGPPCPPCPAPPVA()GPSVFLFPPKPKDTLMISRTPEV
TCVVVDVKQEDPEVQFNWYVDGVEVHNAKTKPREEEFNSTYRVVSVLTVLHQDWLNGKEYKCKVSNKGLPSS
IEKTISKAKGQPREPQVYTLPPSQEEMTKNQVSLTCDVSGFYPSDIAVEWESDGQPENNYKTTPPVLDSDGS
FFLYSRLTVDKSRWEEGDVFSCSVMHEALHNHYTQKSLSLSPG;
CPA.9.086 hIgG4 Variant 2
(SEQ ID NO: 3467)
EVQLVETGGGLIQPGRSLRLSCAASGFTFSSYAMHWVRQAPGKGLEWVAVISYAGEVKYYADSVKGRFTISR
DNSKNTLYLQMNSLRAEDTAVYYCARDPLPLHYYGMDVWGQGTTVTVSSASTKGPSVFPLAPCSRSTSESTA
ALGCLVKDYFPEPVTVSWNSGALTSGVHTFPAVLQSSGLYSLSSVVTVPSSSLGTKTYTCNVDHKPSDTKVD
KRVESKYGPPCPPCPAPPVA()GPSVFLFPPKPKDTLMISRTPEVTCVVVDVKQEDPEVQFNWYVDGVEVHN
AKTKPREEEFNSTYRVVSVLTVLHQDWLNGKEYKCKVSNKGLPSSIEKTISKAKGQPREPQVYTLPPSQEEM
TKNQVSLTCDVSGFYPSDIAVEWESDGQPENNYKTTPPVLDSDGSFFLYSRLTVDKSRWEEGDVFSCSVMHE
ALHNHYTQKSLSLSPG;
CHA.9.547.18 scFv (VL-linker-VH) hIgG4 Variant 2
(SEQ ID NO: 3537)
DIQMTQSPSSLSASVGDRITITCRASQSMAIWLSWYQQKPGKAPKLLIYKASKSHTGVPSRFSGSGSGTDFT
LTISSLQPEDFATYYCQQGQSYPYTFGQGTKLEIKggggsggggsggggsEVQLVESGGGLVQPGGSLRLSC
AASGFTFSSYIMSWVRQAPGKGLEWVATISGGSKGQYYADSVKGRFTISRDNSKNTLYLQMNSLRAEDTAVY
YCAKWLLSYYAMDYWGQGTLVTVSSESKYGPPCPPCPAPPVA()GPSVFLFPPKPKDTLMISRTPEVTCVVV
DVKQEDPEVQFNWYVDGVEVHNAKTKPREEEFNSTYRVVSVLTVLHQDWLNGKEYKCKVSNKGLPSSIEKTI
SKAKGQPREPQVYTLPPSQEEMTKNQVSLTCDVSGFYPSDIAVEWESDGQPENNYKTTPPVLDSDGSFFLYS
RLTVDKSRWEEGDVFSCSVMHEALHNHYTQKSLSLSPG;
CHA.9.547.18 scFv (VH-linker-VL) hIgG4 Variant 2
(SEQ ID NO: 3547)
EVQLVESGGGLVQPGGSLRLSCAASGFTFSSYIMSWVRQAPGKGLEWVATISGGSKGQYYADSVKGRFTISR
DNSKNTLYLQMNSLRAEDTAVYYCAKWLLSYYAMDYWGQGTLVTVSSggggsggggsggggsDIQMTQSPSS
LSASVGDRITITCRASQSMAIWLSWYQQKPGKAPKLLIYKASKSHTGVPSRFSGSGSGTDFTLTISSLQPED
FATYYCQQGQSYPYTFGQGTKLEIKESKYGPPCPPCPAPPVA()GPSVFLFPPKPKDTLMISRTPEVTCVVV
DVKQEDPEVQFNWYVDGVEVHNAKTKPREEEFNSTYRVVSVLTVLHQDWLNGKEYKCKVSNKGLPSSIEKTI
SKAKGQPREPQVYTLPPSQEEMTKNQVSLTCDVSGFYPSDIAVEWESDGQPENNYKTTPPVLDSDGSFFLYS
RLTVDKSRWEEGDVFSCSVMHEALHNHYTQKSLSLSPG;
and
CHA.9.547.18 hIgG4 Variant 2
(SEQ ID NO: 3567)
EVQLVESGGGLVQPGGSLRLSCAASGFTFSSYIMSWVRQAPGKGLEWVATISGGSKGQYYADSVKGRFTISR
DNSKNTLYLQMNSLRAEDTAVYYCAKWLLSYYAMDYWGQGTLVTVSSASTKGPSVFPLAPCSRSTSESTAAL
GCLVKDYFPEPVTVSWNSGALTSGVHTFPAVLQSSGLYSLSSVVTVPSSSLGTKTYTCNVDHKPSDTKVDKR
VESKYGPPCPPCPAPPVA()GPSVFLFPPKPKDTLMISRTPEVTCVVVDVKQEDPEVQFNWYVDGVEVHNAK
TKPREEEFNSTYRVVSVLTVLHQDWLNGKEYKCKVSNKGLPSSIEKTISKAKGQPREPQVYTLPPSQEEMTK
NQVSLTCDVSGFYPSDIAVEWESDGQPENNYKTTPPVLDSDGSFFLYSRLTVDKSRWEEGDVFSCSVMHEAL
HNHYTQKSLSLSPG.

[0507] In some embodiments, the anti-PVRIG portion of the anti-PVRIG/anti-TIGIT bispecific antibody comprises the following anti-PVRIG sequence

CHA.7.518.1 scFv (VH-linker-VL) hIgG4 Variant 1

(SEQ ID NO: 3227)

QVQLVQSGAEVKKPGASVKVSCKASGYTFTDYNINWVRQAPGQGLEWMGY
IYPYIGGSGYAQKFQGRVTMTRDTSTSTVYMELSSLRSEDTAVYYCARED
KTARNAMDYWGQGTLVTVSSggggsggggsggggsDIQMTQSPSSLSASV
GDRVTITCRVSENIYSNLAWYQQKPGKAPKLLIYEATNLAEGVPSRFSGS
GSGTDFTLTISSLQPEDFATYYCQHFWGTPYTFGQGTKLEIKESKYGPPC
PPCPAPPVA()GPSVFLFPPKPKDTLMISRTPEVTCVVVDVKQEDPEVQF
NWYVDGVEVHNAKTKPREEQFNSTYRVVSVLTVLHQDWLNGKEYKCKVSN
KGLPSSIEKTISKAKGQPREPQVYTLPPSQEQMTKNQVKLTCLVKGFYPS
DIAVEWESNGQPENNYKTTPPVLDSDGSFFLYSRLTVDKSRWQEGNVFSC
SVMHEALHNHYTQKSLSLSPG;

and the anti-TIGIT portion of the anti-PVRIG/anti-TIGIT bispecific antibody comprises an anti-TIGIT sequence selected from the group consisting of the following sequences:

CPA.9.086 scFv (VL-linker-VH) hIgG4 Variant 2
(SEQ ID NO: 3437)
QSALTQPRSASGNPGQRVTISCSGSSSNMGRRPVNWYQQIPGTAPKLLIYSQNQRPSGVPDRFSGSQSGTSA
SLTISGLQSEDEAEYFCAVWDDIGRVLQLGGGTQLAVLggggsggggsggggsEVQLVETGGGLIQPGRSLR
LSCAASGFTFSSYAMHWVRQAPGKGLEWVAVISYAGEVKYYADSVKGRFTISRDNSKNTLYLQMNSLRAEDT
AVYYCARDPLPLHYYGMDVWGQGTTVTVSSESKYGPPCPPCPAPPVA()GPSVFLFPPKPKDTLMISRTPEV
TCVVVDVKQEDPEVQFNWYVDGVEVHNAKTKPREEEFNSTYRVVSVLTVLHQDWLNGKEYKCKVSNKGLPSS
IEKTISKAKGQPREPQVYTLPPSQEEMTKNQVSLTCDVSGFYPSDIAVEWESDGQPENNYKTTPPVLDSDGS
FFLYSRLTVDKSRWEEGDVFSCSVMHEALHNHYTQKSLSLSPG;
CPA.9.086 scFv (VH-linker-VL) hIgG4 Variant 2
(SEQ ID NO: 3447)
EVQLVETGGGLIQPGRSLRLSCAASGFTFSSYAMHWVRQAPGKGLEWVAVISYAGEVKYYADSVKGRFTISR
DNSKNTLYLQMNSLRAEDTAVYYCARDPLPLHYYGMDVWGQGTTVTVSSggggsggggsggggsQSALTQPR
SASGNPGQRVTISCSGSSSNMGRRPVNWYQQIPGTAPKLLIYSQNQRPSGVPDRFSGSQSGTSASLTISGLQ
SEDEAEYFCAVWDDIGRVLQLGGGTQLAVLESKYGPPCPPCPAPPVA()GPSVFLFPPKPKDTLMISRTPEV
TCVVVDVKQEDPEVQFNWYVDGVEVHNAKTKPREEEFNSTYRVVSVLTVLHQDWLNGKEYKCKVSNKGLPSS
IEKTISKAKGQPREPQVYTLPPSQEEMTKNQVSLTCDVSGFYPSDIAVEWESDGQPENNYKTTPPVLDSDGS
FFLYSRLTVDKSRWEEGDVFSCSVMHEALHNHYTQKSLSLSPG;
CPA.9.086 hIgG4 Variant 2
(SEQ ID NO: 3467)
EVQLVETGGGLIQPGRSLRLSCAASGFTFSSYAMHWVRQAPGKGLEWVAVISYAGEVKYYADSVKGRFTISR
DNSKNTLYLQMNSLRAEDTAVYYCARDPLPLHYYGMDVWGQGTTVTVSSASTKGPSVFPLAPCSRSTSESTA
ALGCLVKDYFPEPVTVSWNSGALTSGVHTFPAVLQSSGLYSLSSVVTVPSSSLGTKTYTCNVDHKPSDTKVD
KRVESKYGPPCPPCPAPPVA()GPSVFLFPPKPKDTLMISRTPEVTCVVVDVKQEDPEVQFNWYVDGVEVHN
AKTKPREEEFNSTYRVVSVLTVLHQDWLNGKEYKCKVSNKGLPSSIEKTISKAKGQPREPQVYTLPPSQEEM
TKNQVSLTCDVSGFYPSDIAVEWESDGQPENNYKTTPPVLDSDGSFFLYSRLTVDKSRWEEGDVFSCSVMHE
ALHNHYTQKSLSLSPG;
CHA.9.547.18 scFv (VL-linker-VH) hIgG4 Variant 2
(SEQ ID NO: 3537)
DIQMTQSPSSLSASVGDRITITCRASQSMAIWLSWYQQKPGKAPKLLIYKASKSHTGVPSRFSGSGSGTDFT
LTISSLQPEDFATYYCQQGQSYPYTFGQGTKLEIKggggsggggsggggsEVQLVESGGGLVQPGGSLRLSC
AASGFTFSSYIMSWVRQAPGKGLEWVATISGGSKGQYYADSVKGRFTISRDNSKNTLYLQMNSLRAEDTAVY
YCAKWLLSYYAMDYWGQGTLVTVSSESKYGPPCPPCPAPPVA()GPSVFLFPPKPKDTLMISRTPEVTCVVV
DVKQEDPEVQFNWYVDGVEVHNAKTKPREEEFNSTYRVVSVLTVLHQDWLNGKEYKCKVSNKGLPSSIEKTI
SKAKGQPREPQVYTLPPSQEEMTKNQVSLTCDVSGFYPSDIAVEWESDGQPENNYKTTPPVLDSDGSFFLYS
RLTVDKSRWEEGDVFSCSVMHEALHNHYTQKSLSLSPG;
CHA.9.547.18 scFv (VH-linker-VL) hIgG4 Variant 2
(SEQ ID NO: 3547)
EVQLVESGGGLVQPGGSLRLSCAASGFTFSSYIMSWVRQAPGKGLEWVATISGGSKGQYYADSVKGRFTISR
DNSKNTLYLQMNSLRAEDTAVYYCAKWLLSYYAMDYWGQGTLVTVSSggggsggggsggggsDIQMTQSPSS
LSASVGDRITITCRASQSMAIWLSWYQQKPGKAPKLLIYKASKSHTGVPSRFSGSGSGTDFTLTISSLQPED
FATYYCQQGQSYPYTFGQGTKLEIKESKYGPPCPPCPAPPVA()GPSVFLFPPKPKDTLMISRTPEVTCVVV
DVKQEDPEVQFNWYVDGVEVHNAKTKPREEEFNSTYRVVSVLTVLHQDWLNGKEYKCKVSNKGLPSSIEKTI
SKAKGQPREPQVYTLPPSQEEMTKNQVSLTCDVSGFYPSDIAVEWESDGQPENNYKTTPPVLDSDGSFFLYS
RLTVDKSRWEEGDVFSCSVMHEALHNHYTQKSLSLSPG;
and
CHA.9.547.18 hIgG4 Variant 2
(SEQ ID NO: 3567)
EVQLVESGGGLVQPGGSLRLSCAASGFTFSSYIMSWVRQAPGKGLEWVATISGGSKGQYYADSVKGRFTISR
DNSKNTLYLQMNSLRAEDTAVYYCAKWLLSYYAMDYWGQGTLVTVSSASTKGPSVFPLAPCSRSTSESTAAL
GCLVKDYFPEPVTVSWNSGALTSGVHTFPAVLQSSGLYSLSSVVTVPSSSLGTKTYTCNVDHKPSDTKVDKR
VESKYGPPCPPCPAPPVA()GPSVFLFPPKPKDTLMISRTPEVTCVVVDVKQEDPEVQFNWYVDGVEVHNAK
TKPREEEFNSTYRVVSVLTVLHQDWLNGKEYKCKVSNKGLPSSIEKTISKAKGQPREPQVYTLPPSQEEMTK
NQVSLTCDVSGFYPSDIAVEWESDGQPENNYKTTPPVLDSDGSFFLYSRLTVDKSRWEEGDVFSCSVMHEAL
HNHYTQKSLSLSPG.

[0508] In some embodiments, the anti-PVRIG portion of the anti-PVRIG/anti-TIGIT bispecific antibody comprises the following anti-PVRIG sequence

CHA.7.518.1 scFv (VL-linker-VH) hIgG4 Variant 2

(SEQ ID NO: 3237)

DIQMTQSPSSLSASVGDRVTITCRVSENIYSNLAWYQQKPGKAPKLLIYE
ATNLAEGVPSRFSGSGSGTDFTLTISSLQPEDFATYYCQHFWGTPYTFGQ
GTKLEIKggggsggggsggggsQVQLVQSGAEVKKPGASVKVSCKASGYT
FTDYNINWVRQAPGQGLEWMGYIYPYIGGSGYAQKFQGRVTMTRDTSTST
VYMELSSLRSEDTAVYYCAREDKTARNAMDYWGQGTLVTVSSESKYGPPC
PPCPAPPVA()GPSVFLFPPKPKDTLMISRTPEVTCVVVDVKQEDPEVQF
NWYVDGVEVHNAKTKPREEEFNSTYRVVSVLTVLHQDWLNGKEYKCKVSN
KGLPSSIEKTISKAKGQPREPQVYTLPPSQEEMTKNQVSLTCDVSGFYPS
DIAVEWESDGQPENNYKTTPPVLDSDGSFFLYSRLTVDKSRWEEGDVFSC
SVMHEALHNHYTQKSLSLSPG;

and the anti-TIGIT portion of the anti-PVRIG/anti-TIGIT bispecific antibody comprises an anti-TIGIT sequence selected from the group consisting of the following sequences:

CPA.9.086 scFv (VL-linker-VH) hIgG4 Variant 1
(SEQ ID NO: 3417)
QSALTQPRSASGNPGQRVTISCSGSSSNMGRRPVNWYQQIPGTAPKLLIYSQNQRPSGVPDRFSGSQSGTSA
SLTISGLQSEDEAEYFCAVWDDIGRVLQLGGGTQLAVLggggsggggsggggsEVQLVETGGGLIQPGRSLR
LSCAASGFTFSSYAMHWVRQAPGKGLEWVAVISYAGEVKYYADSVKGRFTISRDNSKNTLYLQMNSLRAEDT
AVYYCARDPLPLHYYGMDVWGQGTTVTVSSESKYGPPCPPCPAPPVA()GPSVFLFPPKPKDTLMISRTPEV
TCVVVDVKQEDPEVQFNWYVDGVEVHNAKTKPREEQFNSTYRVVSVLTVLHQDWLNGKEYKCKVSNKGLPSS
IEKTISKAKGQPREPQVYTLPPSQEQMTKNQVKLTCLVKGFYPSDIAVEWESNGQPENNYKTTPPVLDSDGS
FFLYSRLTVDKSRWQEGNVFSCSVMHEALHNHYTQKSLSLSPG;
CPA.9.086 scFv (VH-linker-VL) hIgG4 Variant 1
(SEQ ID NO: 3427)
EVQLVETGGGLIQPGRSLRLSCAASGFTFSSYAMHWVRQAPGKGLEWVAVISYAGEVKYYADSVKGRFTISR
DNSKNTLYLQMNSLRAEDTAVYYCARDPLPLHYYGMDVWGQGTTVTVSSggggsggggsggggsQSALTQPR
SASGNPGQRVTISCSGSSSNMGRRPVNWYQQIPGTAPKLLIYSQNQRPSGVPDRFSGSQSGTSASLTISGLQ
SEDEAEYFCAVWDDIGRVLQLGGGTQLAVLESKYGPPCPPCPAPPVA()GPSVFLFPPKPKDTLMISRTPEV
TCVVVDVKQEDPEVQFNWYVDGVEVHNAKTKPREEQFNSTYRVVSVLTVLHQDWLNGKEYKCKVSNKGLPSS
IEKTISKAKGQPREPQVYTLPPSQEQMTKNQVKLTCLVKGFYPSDIAVEWESNGQPENNYKTTPPVLDSDGS
FFLYSRLTVDKSRWQEGNVFSCSVMHEALHNHYTQKSLSLSPG;
CPA.9.086 hIgG4 Variant 1
(SEQ ID NO: 3457)
EVQLVETGGGLIQPGRSLRLSCAASGFTFSSYAMHWVRQAPGKGLEWVAVISYAGEVKYYADSVKGRFTISR
DNSKNTLYLQMNSLRAEDTAVYYCARDPLPLHYYGMDVWGQGTTVTVSSASTKGPSVFPLAPCSRSTSESTA
ALGCLVKDYFPEPVTVSWNSGALTSGVHTFPAVLQSSGLYSLSSVVTVPSSSLGTKTYTCNVDHKPSDTKVD
KRVESKYGPPCPPCPAPPVA()GPSVFLFPPKPKDTLMISRTPEVTCVVVDVKQEDPEVQFNWYVDGVEVHN
AKTKPREEQFNSTYRVVSVLTVLHQDWLNGKEYKCKVSNKGLPSSIEKTISKAKGQPREPQVYTLPPSQEQM
TKNQVKLTCLVKGFYPSDIAVEWESNGQPENNYKTTPPVLDSDGSFFLYSRLTVDKSRWQEGNVFSCSVMHE
ALHNHYTQKSLSLSPG;
CHA.9.547.18 scFv (VL-linker-VH) hIgG4 Variant 1
(SEQ ID NO: 3517)
DIQMTQSPSSLSASVGDRITITCRASQSMAIWLSWYQQKPGKAPKLLIYKASKSHTGVPSRFSGSGSGTDFT
LTISSLQPEDFATYYCQQGQSYPYTFGQGTKLEIKggggsggggsggggsEVQLVESGGGLVQPGGSLRLSC
AASGFTFSSYIMSWVRQAPGKGLEWVATISGGSKGQYYADSVKGRFTISRDNSKNTLYLQMNSLRAEDTAVY
YCAKWLLSYYAMDYWGQGTLVTVSSESKYGPPCPPCPAPPVA()GPSVFLFPPKPKDTLMISRTPEVTCVVV
DVKQEDPEVQFNWYVDGVEVHNAKTKPREEQFNSTYRVVSVLTVLHQDWLNGKEYKCKVSNKGLPSSIEKTI
SKAKGQPREPQVYTLPPSQEQMTKNQVKLTCLVKGFYPSDIAVEWESNGQPENNYKTTPPVLDSDGSFFLYS
RLTVDKSRWQEGNVFSCSVMHEALHNHYTQKSLSLSPG;
CHA.9.547.18 scFv (VH-linker-VL) hIgG4 Variant 1
(SEQ ID NO: 3527)
EVQLVESGGGLVQPGGSLRLSCAASGFTFSSYIMSWVRQAPGKGLEWVATISGGSKGQYYADSVKGRFTISR
DNSKNTLYLQMNSLRAEDTAVYYCAKWLLSYYAMDYWGQGTLVTVSSggggsggggsggggsDIQMTQSPSS
LSASVGDRITITCRASQSMAIWLSWYQQKPGKAPKLLIYKASKSHTGVPSRFSGSGSGTDFTLTISSLQPED
FATYYCQQGQSYPYTFGQGTKLEIKESKYGPPCPPCPAPPVA()GPSVFLFPPKPKDTLMISRTPEVTCVVV
DVKQEDPEVQFNWYVDGVEVHNAKTKPREEQFNSTYRVVSVLTVLHQDWLNGKEYKCKVSNKGLPSSIEKTI
SKAKGQPREPQVYTLPPSQEQMTKNQVKLTCLVKGFYPSDIAVEWESNGQPENNYKTTPPVLDSDGSFFLYS
RLTVDKSRWQEGNVFSCSVMHEALHNHYTQKSLSLSPG;
and
CHA.9.547.18 hIgG4 Variant 1
(SEQ ID NO: 3557)
EVQLVESGGGLVQPGGSLRLSCAASGFTFSSYIMSWVRQAPGKGLEWVATISGGSKGQYYADSVKGRFTISR
DNSKNTLYLQMNSLRAEDTAVYYCAKWLLSYYAMDYWGQGTLVTVSSASTKGPSVFPLAPCSRSTSESTAAL
GCLVKDYFPEPVTVSWNSGALTSGVHTFPAVLQSSGLYSLSSVVTVPSSSLGTKTYTCNVDHKPSNTKVDKR
VESKYGPPCPPCPAPPVA()GPSVFLFPPKPKDTLMISRTPEVTCVVVDVKQEDPEVQFNWYVDGVEVHNAK
TKPREEQFNSTYRVVSVLTVLHQDWLNGKEYKCKVSNKGLPSSIEKTISKAKGQPREPQVYTLPPSQEQMTK
NQVKLTCLVKGFYPSDIAVEWESNGQPENNYKTTPPVLDSDGSFFLYSRLTVDKSRWQEGNVFSCSVMHEAL
HNHYTQKSLSLSPG;

[0509] In some embodiments, the anti-PVRIG portion of the anti-PVRIG/anti-TIGIT bispecific antibody comprises the following anti-PVRIG sequence

CHA.7.518.1 scFv (VH-linker-VL) hIgG4 Variant 2

(SEQ ID NO: 3247)

QVQLVQSGAEVKKPGASVKVSCKASGYTFTDYNINWVRQAPGQGLEWMGY
IYPYIGGSGYAQKFQGRVTMTRDTSTSTVYMELSSLRSEDTAVYYCARED
KTARNAMDYWGQGTLVTVSSggggsggggsggggsDIQMTQSPSSLSASV
GDRVTITCRVSENIYSNLAWYQQKPGKAPKLLIYEATNLAEGVPSRFSGS
GSGTDFTLTISSLQPEDFATYYCQHFWGTPYTFGQGTKLEIKESKYGPPC
PPCPAPPVA()GPSVFLFPPKPKDTLMISRTPEVTCVVVDVKQEDPEVQF
NWYVDGVEVHNAKTKPREEEFNSTYRVVSVLTVLHQDWLNGKEYKCKVSN
KGLPSSIEKTISKAKGQPREPQVYTLPPSQEEMTKNQVSLTCDVSGFYPS
DIAVEWESDGQPENNYKTTPPVLDSDGSFFLYSRLTVDKSRWEEGDVFSC
SVMHEALHNHYTQKSLSLSPG;

and the anti-TIGIT portion of the anti-PVRIG/anti-TIGIT bispecific antibody comprises an anti-TIGIT sequence selected from the group consisting of the following sequences:

CPA.9.086 scFv (VL-linker-VH) hIgG4 Variant 1
(SEQ ID NO: 3417)
QSALTQPRSASGNPGQRVTISCSGSSSNMGRRPVNWYQQIPGTAPKLLIYSQNQRPSGVPDRFSGSQSGTSA
SLTISGLQSEDEAEYFCAVWDDIGRVLQLGGGTQLAVLggggsggggsggggsEVQLVETGGGLIQPGRSLR
LSCAASGFTFSSYAMHWVRQAPGKGLEWVAVISYAGEVKYYADSVKGRFTISRDNSKNTLYLQMNSLRAEDT
AVYYCARDPLPLHYYGMDVWGQGTTVTVSSESKYGPPCPPCPAPPVA()GPSVFLFPPKPKDTLMISRTPEV
TCVVVDVKQEDPEVQFNWYVDGVEVHNAKTKPREEQFNSTYRVVSVLTVLHQDWLNGKEYKCKVSNKGLPSS
IEKTISKAKGQPREPQVYTLPPSQEQMTKNQVKLTCLVKGFYPSDIAVEWESNGQPENNYKTTPPVLDSDGS
FFLYSRLTVDKSRWQEGNVFSCSVMHEALHNHYTQKSLSLSPG;
CPA.9.086 scFv (VH-linker-VL) hIgG4 Variant 1
(SEQ ID NO: 3427)
EVQLVETGGGLIQPGRSLRLSCAASGFTFSSYAMHWVRQAPGKGLEWVAVISYAGEVKYYADSVKGRFTISR
DNSKNTLYLQMNSLRAEDTAVYYCARDPLPLHYYGMDVWGQGTTVTVSSggggsggggsggggsQSALTQPR
SASGNPGQRVTISCSGSSSNMGRRPVNWYQQIPGTAPKLLIYSQNQRPSGVPDRFSGSQSGTSASLTISGLQ
SEDEAEYFCAVWDDIGRVLQLGGGTQLAVLESKYGPPCPPCPAPPVA()GPSVFLFPPKPKDTLMISRTPEV
TCVVVDVKQEDPEVQFNWYVDGVEVHNAKTKPREEQFNSTYRVVSVLTVLHQDWLNGKEYKCKVSNKGLPSS
IEKTISKAKGQPREPQVYTLPPSQEQMTKNQVKLTCLVKGFYPSDIAVEWESNGQPENNYKTTPPVLDSDGS
FFLYSRLTVDKSRWQEGNVFSCSVMHEALHNHYTQKSLSLSPG;
CPA.9.086 hIgG4 Variant 1
(SEQ ID NO: 3457)
EVQLVETGGGLIQPGRSLRLSCAASGFTFSSYAMHWVRQAPGKGLEWVAVISYAGEVKYYADSVKGRFTISR
DNSKNTLYLQMNSLRAEDTAVYYCARDPLPLHYYGMDVWGQGTTVTVSSASTKGPSVFPLAPCSRSTSESTA
ALGCLVKDYFPEPVTVSWNSGALTSGVHTFPAVLQSSGLYSLSSVVTVPSSSLGTKTYTCNVDHKPSDTKVD
KRVESKYGPPCPPCPAPPVA()GPSVFLFPPKPKDTLMISRTPEVTCVVVDVKQEDPEVQFNWYVDGVEVHN
AKTKPREEQFNSTYRVVSVLTVLHQDWLNGKEYKCKVSNKGLPSSIEKTISKAKGQPREPQVYTLPPSQEQM
TKNQVKLTCLVKGFYPSDIAVEWESNGQPENNYKTTPPVLDSDGSFFLYSRLTVDKSRWQEGNVFSCSVMHE
ALHNHYTQKSLSLSPG;
CHA.9.547.18 scFv (VL-linker-VH) hIgG4 Variant 1
(SEQ ID NO: 3517)
DIQMTQSPSSLSASVGDRITITCRASQSMAIWLSWYQQKPGKAPKLLIYKASKSHTGVPSRFSGSGSGTDFT
LTISSLQPEDFATYYCQQGQSYPYTFGQGTKLEIKggggsggggsggggsEVQLVESGGGLVQPGGSLRLSC
AASGFTFSSYIMSWVRQAPGKGLEWVATISGGSKGQYYADSVKGRFTISRDNSKNTLYLQMNSLRAEDTAVY
YCAKWLLSYYAMDYWGQGTLVTVSSESKYGPPCPPCPAPPVA()GPSVFLFPPKPKDTLMISRTPEVTCVVV
DVKQEDPEVQFNWYVDGVEVHNAKTKPREEQFNSTYRVVSVLTVLHQDWLNGKEYKCKVSNKGLPSSIEKTI
SKAKGQPREPQVYTLPPSQEQMTKNQVKLTCLVKGFYPSDIAVEWESNGQPENNYKTTPPVLDSDGSFFLYS
RLTVDKSRWQEGNVFSCSVMHEALHNHYTQKSLSLSPG;
CHA.9.547.18 scFv (VH-linker-VL) hIgG4 Variant 1
(SEQ ID NO: 3527)
EVQLVESGGGLVQPGGSLRLSCAASGFTFSSYIMSWVRQAPGKGLEWVATISGGSKGQYYADSVKGRFTISR
DNSKNTLYLQMNSLRAEDTAVYYCAKWLLSYYAMDYWGQGTLVTVSSggggsggggsggggsDIQMTQSPSS
LSASVGDRITITCRASQSMAIWLSWYQQKPGKAPKLLIYKASKSHTGVPSRFSGSGSGTDFTLTISSLQPED
FATYYCQQGQSYPYTFGQGTKLEIKESKYGPPCPPCPAPPVA()GPSVFLFPPKPKDTLMISRTPEVTCVVV
DVKQEDPEVQFNWYVDGVEVHNAKTKPREEQFNSTYRVVSVLTVLHQDWLNGKEYKCKVSNKGLPSSIEKTI
SKAKGQPREPQVYTLPPSQEQMTKNQVKLTCLVKGFYPSDIAVEWESNGQPENNYKTTPPVLDSDGSFFLYS
RLTVDKSRWQEGNVFSCSVMHEALHNHYTQKSLSLSPG;
and
CHA.9.547.18 hIgG4 Variant 1
(SEQ ID NO: 3557)
EVQLVESGGGLVQPGGSLRLSCAASGFTFSSYIMSWVRQAPGKGLEWVATISGGSKGQYYADSVKGRFTISR
DNSKNTLYLQMNSLRAEDTAVYYCAKWLLSYYAMDYWGQGTLVTVSSASTKGPSVFPLAPCSRSTSESTAAL
GCLVKDYFPEPVTVSWNSGALTSGVHTFPAVLQSSGLYSLSSVVTVPSSSLGTKTYTCNVDHKPSNTKVDKR
VESKYGPPCPPCPAPPVA()GPSVFLFPPKPKDTLMISRTPEVTCVVVDVKQEDPEVQFNWYVDGVEVHNAK
TKPREEQFNSTYRVVSVLTVLHQDWLNGKEYKCKVSNKGLPSSIEKTISKAKGQPREPQVYTLPPSQEQMTK
NQVKLTCLVKGFYPSDIAVEWESNGQPENNYKTTPPVLDSDGSFFLYSRLTVDKSRWQEGNVFSCSVMHEAL
HNHYTQKSLSLSPG.

[0510] In some embodiments, the anti-PVRIG portion of the anti-PVRIG/anti-TIGIT bispecific antibody comprises the following anti-PVRIG sequence

CHA.7.518.1 hIgG4 Variant 1

(SEQ ID NO: 3257)

QVQLVQSGAEVKKPGASVKVSCKASGYTFTDYNINWVRQAPGQGLEWMGY
IYPYIGGSGYAQKFQGRVTMTRDTSTSTVYMELSSLRSEDTAVYYCARED
KTARNAMDYWGQGTLVTVSSASTKGPSVFPLAPCSRSTSESTAALGCLVK
DYFPEPVTVSWNSGALTSGVHTFPAVLQSSGLYSLSSVVTVPSSSLGTKT
YTCNVDHKPSNTKVDKRVESKYGPPCPPCPAPPVA()GPSVFLFPPKPKD
TLMISRTPEVTCVVVDVKQEDPEVQFNWYVDGVEVHNAKTKPREEQFNST
YRVVSVLTVLHQDWLNGKEYKCKVSNKGLPSSIEKTISKAKGQPREPQVY
TLPPSQEQMTKNQVKLTCLVKGFYPSDIAVEWESNGQPENNYKTTPPVLD
SDGSFFLYSRLTVDKSRWQEGNVFSCSVMHEALHNHYTQKSLSLSPG;

and the anti-TIGIT portion of the anti-PVRIG/anti-TIGIT bispecific antibody comprises an anti-TIGIT sequence selected from the group consisting of the following sequences:

CPA.9.086 scFv (VL-linker-VH) hIgG4 Variant 2
(SEQ ID NO: 3437)
QSALTQPRSASGNPGQRVTISCSGSSSNMGRRPVNWYQQIPGTAPKLLIYSQNQRPSGVPDRFSGSQSGTSA
SLTISGLQSEDEAEYFCAVWDDIGRVLQLGGGTQLAVLggggsggggsggggsEVQLVETGGGLIQPGRSLR
LSCAASGFTFSSYAMHWVRQAPGKGLEWVAVISYAGEVKYYADSVKGRFTISRDNSKNTLYLQMNSLRAEDT
AVYYCARDPLPLHYYGMDVWGQGTTVTVSSESKYGPPCPPCPAPPVA()GPSVFLFPPKPKDTLMISRTPEV
TCVVVDVKQEDPEVQFNWYVDGVEVHNAKTKPREEEFNSTYRVVSVLTVLHQDWLNGKEYKCKVSNKGLPSS
IEKTISKAKGQPREPQVYTLPPSQEEMTKNQVSLTCDVSGFYPSDIAVEWESDGQPENNYKTTPPVLDSDGS
FFLYSRLTVDKSRWEEGDVFSCSVMHEALHNHYTQKSLSLSPG;
CPA.9.086 scFv (VH-linker-VL) hIgG4 Variant 2
(SEQ ID NO: 3447)
EVQLVETGGGLIQPGRSLRLSCAASGFTFSSYAMHWVRQAPGKGLEWVAVISYAGEVKYYADSVKGRFTISR
DNSKNTLYLQMNSLRAEDTAVYYCARDPLPLHYYGMDVWGQGTTVTVSSggggsggggsggggsQSALTQPR
SASGNPGQRVTISCSGSSSNMGRRPVNWYQQIPGTAPKLLIYSQNQRPSGVPDRFSGSQSGTSASLTISGLQ
SEDEAEYFCAVWDDIGRVLQLGGGTQLAVLESKYGPPCPPCPAPPVA()GPSVFLFPPKPKDTLMISRTPEV
TCVVVDVKQEDPEVQFNWYVDGVEVHNAKTKPREEEFNSTYRVVSVLTVLHQDWLNGKEYKCKVSNKGLPSS
IEKTISKAKGQPREPQVYTLPPSQEEMTKNQVSLTCDVSGFYPSDIAVEWESDGQPENNYKTTPPVLDSDGS
FFLYSRLTVDKSRWEEGDVFSCSVMHEALHNHYTQKSLSLSPG;
CPA.9.086 hIgG4 Variant 2
(SEQ ID NO: 3467)
EVQLVETGGGLIQPGRSLRLSCAASGFTFSSYAMHWVRQAPGKGLEWVAVISYAGEVKYYADSVKGRFTISR
DNSKNTLYLQMNSLRAEDTAVYYCARDPLPLHYYGMDVWGQGTTVTVSSASTKGPSVFPLAPCSRSTSESTA
ALGCLVKDYFPEPVTVSWNSGALTSGVHTFPAVLQSSGLYSLSSVVTVPSSSLGTKTYTCNVDHKPSDTKVD
KRVESKYGPPCPPCPAPPVA()GPSVFLFPPKPKDTLMISRTPEVTCVVVDVKQEDPEVQFNWYVDGVEVHN
AKTKPREEEFNSTYRVVSVLTVLHQDWLNGKEYKCKVSNKGLPSSIEKTISKAKGQPREPQVYTLPPSQEEM
TKNQVSLTCDVSGFYPSDIAVEWESDGQPENNYKTTPPVLDSDGSFFLYSRLTVDKSRWEEGDVFSCSVMHE
ALHNHYTQKSLSLSPG;
CHA.9.547.18 scFv (VL-linker-VH) hIgG4 Variant 2
(SEQ ID NO: 3537)
DIQMTQSPSSLSASVGDRITITCRASQSMAIWLSWYQQKPGKAPKLLIYKASKSHTGVPSRFSGSGSGTDFT
LTISSLQPEDFATYYCQQGQSYPYTFGQGTKLEIKggggsggggsggggsEVQLVESGGGLVQPGGSLRLSC
AASGFTFSSYIMSWVRQAPGKGLEWVATISGGSKGQYYADSVKGRFTISRDNSKNTLYLQMNSLRAEDTAVY
YCAKWLLSYYAMDYWGQGTLVTVSSESKYGPPCPPCPAPPVA()GPSVFLFPPKPKDTLMISRTPEVTCVVV
DVKQEDPEVQFNWYVDGVEVHNAKTKPREEEFNSTYRVVSVLTVLHQDWLNGKEYKCKVSNKGLPSSIEKTI
SKAKGQPREPQVYTLPPSQEEMTKNQVSLTCDVSGFYPSDIAVEWESDGQPENNYKTTPPVLDSDGSFFLYS
RLTVDKSRWEEGDVFSCSVMHEALHNHYTQKSLSLSPG;
CHA.9.547.18 scFv (VH-linker-VL) hIgG4 Variant 2
(SEQ ID NO: 3547)
EVQLVESGGGLVQPGGSLRLSCAASGFTFSSYIMSWVRQAPGKGLEWVATISGGSKGQYYADSVKGRFTISR
DNSKNTLYLQMNSLRAEDTAVYYCAKWLLSYYAMDYWGQGTLVTVSSggggsggggsggggsDIQMTQSPSS
LSASVGDRITITCRASQSMAIWLSWYQQKPGKAPKLLIYKASKSHTGVPSRFSGSGSGTDFTLTISSLQPED
FATYYCQQGQSYPYTFGQGTKLEIKESKYGPPCPPCPAPPVA()GPSVFLFPPKPKDTLMISRTPEVTCVVV
DVKQEDPEVQFNWYVDGVEVHNAKTKPREEEFNSTYRVVSVLTVLHQDWLNGKEYKCKVSNKGLPSSIEKTI
SKAKGQPREPQVYTLPPSQEEMTKNQVSLTCDVSGFYPSDIAVEWESDGQPENNYKTTPPVLDSDGSFFLYS
RLTVDKSRWEEGDVFSCSVMHEALHNHYTQKSLSLSPG;
and
CHA.9.547.18 hIgG4 Variant 2
(SEQ ID NO: 3567)
EVQLVESGGGLVQPGGSLRLSCAASGFTFSSYIMSWVRQAPGKGLEWVATISGGSKGQYYADSVKGRFTISR
DNSKNTLYLQMNSLRAEDTAVYYCAKWLLSYYAMDYWGQGTLVTVSSASTKGPSVFPLAPCSRSTSESTAAL
GCLVKDYFPEPVTVSWNSGALTSGVHTFPAVLQSSGLYSLSSVVTVPSSSLGTKTYTCNVDHKPSDTKVDKR
VESKYGPPCPPCPAPPVA()GPSVFLFPPKPKDTLMISRTPEVTCVVVDVKQEDPEVQFNWYVDGVEVHNAK
TKPREEEFNSTYRVVSVLTVLHQDWLNGKEYKCKVSNKGLPSSIEKTISKAKGQPREPQVYTLPPSQEEMTK
NQVSLTCDVSGFYPSDIAVEWESDGQPENNYKTTPPVLDSDGSFFLYSRLTVDKSRWEEGDVFSCSVMHEAL
HNHYTQKSLSLSPG.

[0511] In some embodiments, the anti-PVRIG portion of the anti-PVRIG/anti-TIGIT bispecific antibody comprises the following anti-PVRIG sequence

CHA.7.518.1 hIgG4 Variant 2

(SEQ ID NO: 3267)

QVQLVQSGAEVKKPGASVKVSCKASGYTFTDYNINWVRQAPGQGLEWMGY
IYPYIGGSGYAQKFQGRVTMTRDTSTSTVYMELSSLRSEDTAVYYCARED
KTARNAMDYWGQGTLVTVSSASTKGPSVFPLAPCSRSTSESTAALGCLVK
DYFPEPVTVSWNSGALTSGVHTFPAVLQSSGLYSLSSVVTVPSSSLGTKT
YTCNVDHKPSDTKVDKRVESKYGPPCPPCPAPPVA()GPSVFLFPPKPKD
TLMISRTPEVTCVVVDVKQEDPEVQFNWYVDGVEVHNAKTKPREEEFNST
YRVVSVLTVLHQDWLNGKEYKCKVSNKGLPSSIEKTISKAKGQPREPQVY
TLPPSQEEMTKNQVSLTCDVSGFYPSDIAVEWESDGQPENNYKTTPPVLD
SDGSFFLYSRLTVDKSRWEEGDVFSCSVMHEALHNHYTQKSLSLSPG;

and the anti-TIGIT portion of the anti-PVRIG/anti-TIGIT bispecific antibody comprises an anti-TIGIT sequence selected from the following:

CPA.9.086 scFv (VL-linker-VH) hIgG4 Variant 1

(SEQ ID NO: 3417)

QSALTQPRSASGNPGQRVTISCSGSSSNMGRRPVNWYQQIPGTAPKLLIY
SQNQRPSGVPDRFSGSQSGTSASLTISGLQSEDEAEYFCAVWDDIGRVLQ
LGGGTQLAVLggggsggggsggggsEVQLVETGGGLIQPGRSLRLSCAAS
GFTFSSYAMHWVRQAPGKGLEWVAVISYAGEVKYYADSVKGRFTISRDNS
KNTLYLQMNSLRAEDTAVYYCARDPLPLHYYGMDVWGQGTTVTVSSESKY
GPPCPPCPAPPVA()GPSVFLFPPKPKDTLMISRTPEVTCVVVDVKQEDP
EVQFNWYVDGVEVHNAKTKPREEQFNSTYRVVSVLTVLHQDWLNGKEYKC
KVSNKGLPSSIEKTISKAKGQPREPQVYTLPPSQEQMTKNQVKLTCLVKG
FYPSDIAVEWESNGQPENNYKTTPPVLDSDGSFFLYSRLTVDKSRWQEGN
VFSCSVMHEALHNHYTQKSLSLSPG;
CPA.9.086 scFv (VH-linker-VL) hIgG4 Variant 1

(SEQ ID NO: 3427)

EVQLVETGGGLIQPGRSLRLSCAASGFTFSSYAMHWVRQAPGKGLEWVAV
ISYAGEVKYYADSVKGRFTISRDNSKNTLYLQMNSLRAEDTAVYYCARDP
LPLHYYGMDVWGQGTTVTVSSggggsggggsggggsQSALTQPRSASGNP
GQRVTISCSGSSSNMGRRPVNWYQQIPGTAPKLLIYSQNQRPSGVPDRFS
GSQSGTSASLTISGLQSEDEAEYFCAVWDDIGRVLQLGGGTQLAVLESKY
GPPCPPCPAPPVA()GPSVFLFPPKPKDTLMISRTPEVTCVVVDVKQEDP
EVQFNWYVDGVEVHNAKTKPREEQFNSTYRVVSVLTVLHQDWLNGKEYKC
KVSNKGLPSSIEKTISKAKGQPREPQVYTLPPSQEQMTKNQVKLTCLVKG
FYPSDIAVEWESNGQPENNYKTTPPVLDSDGSFFLYSRLTVDKSRWQEGN
VFSCSVMHEALHNHYTQKSLSLSPG;
CPA.9.086 hIgG4 Variant 1

(SEQ ID NO: 3457)

EVQLVETGGGLIQPGRSLRLSCAASGFTFSSYAMHWVRQAPGKGLEWVAV
ISYAGEVKYYADSVKGRFTISRDNSKNTLYLQMNSLRAEDTAVYYCARDP
LPLHYYGMDVWGQGTTVTVSSASTKGPSVFPLAPCSRSTSESTAALGCLV
KDYFPEPVTVSWNSGALTSGVHTFPAVLQSSGLYSLSSVVTVPSSSLGTK
TYTCNVDHKPSDTKVDKRVESKYGPPCPPCPAPPVA()GPSVFLFPPKPK
DTLMISRTPEVTCVVVDVKQEDPEVQFNWYVDGVEVHNAKTKPREEQFNS
TYRVVSVLTVLHQDWLNGKEYKCKVSNKGLPSSIEKTISKAKGQPREPQV
YTLPPSQEQMTKNQVKLTCLVKGFYPSDIAVEWESNGQPENNYKTTPPVL
DSDGSFFLYSRLTVDKSRWQEGNVFSCSVMHEALHNHYTQKSLSLSPG;
CHA.9.547.18 scFv (VL-linker-VH) hIgG4 Variant 1

(SEQ ID NO: 3517)

DIQMTQSPSSLSASVGDRITITCRASQSMAIWLSWYQQKPGKAPKLLIYK
ASKSHTGVPSRFSGSGSGTDFTLTISSLQPEDFATYYCQQGQSYPYTFGQ
GTKLEIKggggsggggsggggsEVQLVESGGGLVQPGGSLRLSCAASGFT
FSSYIMSWVRQAPGKGLEWVATISGGSKGQYYADSVKGRFTISRDNSKNT
LYLQMNSLRAEDTAVYYCAKWLLSYYAMDYWGQGTLVTVSSESKYGPPCP
PCPAPPVA()GPSVFLFPPKPKDTLMISRTPEVTCVVVDVKQEDPEVQFN
WYVDGVEVHNAKTKPREEQFNSTYRVVSVLTVLHQDWLNGKEYKCKVSNK
GLPSSIEKTISKAKGQPREPQVYTLPPSQEQMTKNQVKLTCLVKGFYPSD
IAVEWESNGQPENNYKTTPPVLDSDGSFFLYSRLTVDKSRWQEGNVFSCS
VMHEALHNHYTQKSLSLSPG;
CHA.9.547.18 scFv (VH-linker-VL) hIgG4 Variant 1

(SEQ ID NO: 3527)

EVQLVESGGGLVQPGGSLRLSCAASGFTFSSYIMSWVRQAPGKGLEWVAT
ISGGSKGQYYADSVKGRFTISRDNSKNTLYLQMNSLRAEDTAVYYCAKWL
LSYYAMDYWGQGTLVTVSSggggsggggsggggsDIQMTQSPSSLSASVG
DRITITCRASQSMAIWLSWYQQKPGKAPKLLIYKASKSHTGVPSRFSGSG
SGTDFTLTISSLQPEDFATYYCQQGQSYPYTFGQGTKLEIKESKYGPPCP
PCPAPPVA()GPSVFLFPPKPKDTLMISRTPEVTCVVVDVKQEDPEVQFN
WYVDGVEVHNAKTKPREEQFNSTYRVVSVLTVLHQDWLNGKEYKCKVSNK
GLPSSIEKTISKAKGQPREPQVYTLPPSQEQMTKNQVKLTCLVKGFYPSD
IAVEWESNGQPENNYKTTPPVLDSDGSFFLYSRLTVDKSRWQEGNVFSCS
VMHEALHNHYTQKSLSLSPG;
and
CHA.9.547.18 hIgG4 Variant 1

(SEQ ID NO: 3557)

EVQLVESGGGLVQPGGSLRLSCAASGFTFSSYIMSWVRQAPGKGLEWVAT
ISGGSKGQYYADSVKGRFTISRDNSKNTLYLQMNSLRAEDTAVYYCAKWL
LSYYAMDYWGQGTLVTVSSASTKGPSVFPLAPCSRSTSESTAALGCLVKD
YFPEPVTVSWNSGALTSGVHTFPAVLQSSGLYSLSSVVTVPSSSLGTKTY
TCNVDHKPSNTKVDKRVESKYGPPCPPCPAPPVA()GPSVFLFPPKPKDT
LMISRTPEVTCVVVDVKQEDPEVQFNWYVDGVEVHNAKTKPREEQFNSTY
RVVSVLTVLHQDWLNGKEYKCKVSNKGLPSSIEKTISKAKGQPREPQVYT
LPPSQEQMTKNQVKLTCLVKGFYPSDIAVEWESNGQPENNYKTTPPVLDS
DGSFFLYSRLTVDKSRWQEGNVFSCSVMHEALHNHYTQKSLSLSPG.

[0512] In some embodiments, the anti-PVRIG portion of the anti-PVRIG/anti-TIGIT bispecific antibody comprises the following anti-PVRIG sequence

CHA.7.518.1 VH Clambda-VL-CH1 Crossmab hIgG4
Fc Y349C E356D L358L T366S L368A Y407V Hole

(SEQ ID NO: 3655)

QVQLVQSGAEVKKPGASVKVSCKASGYTFTDYNINWVRQAPGQGLEWMGY
IYPYIGGSGYAQKFQGRVTMTRDTSTSTVYMELSSLRSEDTAVYYCARED
KTARNAMDYWGQGTLVTVSSASVAAPSVFIFPPSDEQLKSGTASVVCLLN
NFYPREAKVQWKVDNALQSGNSQESVTEQDSKDSTYSLSSTLTLSKADYE
KHKVYACEVTHQGLSSPVTKSFNRGECESKYGPPCPPCPAPEFLGGPSVF
LFPPKPKDTLMISRTPEVTCVVVDVSQEDPEVQFNWYVDGVEVHNAKTKP
REEQFNSTYRVVSVLTVLHQDWLNGKEYKCKVSNKGLPSSIEKTISKAKG
QPREPQVCTLPPSQDELTKNQVSLSCAVKGFYPSDIAVEWESNGQPENNY
KTTPPVLDSDGSFFLVSRLTVDKSRWQEGNVFSCSVMHEALHNHYTQKSL
SLSPG;

and the anti-TIGIT portion of the anti-PVRIG/anti-TIGIT bispecific antibody comprises an anti-TIGIT sequence selected from the group consisting of the following sequences:

CPA.9.086 VH Clambda-VL-CH1 Crossmab hIgG4 Fc
Y354C E356D M348L T366W Knob

(SEQ ID NO: 3487)

EVQLVETGGGLIQPGRSLRLSCAASGFTFSSYAMHWVRQAPGKGLEWVAV
ISYAGEVKYYADSVKGRFTISRDNSKNTLYLQMNSLRAEDTAVYYCARDP
LPLHYYGMDVWGQGTTVTVSSASGQPKAAPSVTLFPPSSEELQANKATLV
CLISDFYPGAVTVAWKADSSPVKAGVETTTPSKQSNNKYAASSYLSLTPE
QWKSHRSYSCQVTHEGSTVEKTVAPTECSESKYGPPCPPCPAPEFLGGPS
VFLFPPKPKDTLMISRTPEVTCVVVDVSQEDPEVQFNWYVDGVEVHNAKT
KPREEQFNSTYRVVSVLTVLHQDWLNGKEYKCKVSNKGLPSSIEKTISKA
KGQPREPQVYTLPPCQDELTKNQVSLWCLVKGFYPSDIAVEWESNGQPEN
NYKTTPPVLDSDGSFFLYSRLTVDKSRWQEGNVFSCSVMHEALHNHYTQK
SLSLSPG;
CPA.9.086 VH hIgG4 Fc Y354C E356D M348L T366W
Knob

(SEQ ID NO: 3507)

EVQLVETGGGLIQPGRSLRLSCAASGFTFSSYAMHWVRQAPGKGLEWVAV
ISYAGEVKYYADSVKGRFTISRDNSKNTLYLQMNSLRAEDTAVYYCARDP
LPLHYYGMDVWGQGTTVTVSSASASTKGPSVFPLAPCSRSTSESTAALGC
LVKDYFPEPVTVSWNSGALTSGVHTFPAVLQSSGLYSLSSVVTVPSSSLG
TKTYTCNVDHKPSNTKVDKRVESKYGPPCPPCPAPEFLGGPSVFLFPPKP
KDTLMISRTPEVTCVVVDVSQEDPEVQFNWYVDGVEVHNAKTKPREEQFN
STYRVVSVLTVLHQDWLNGKEYKCKVSNKGLPSSIEKTISKAKGQPREPQ
VYTLPPCQDELTKNQVSLWCLVKGFYPSDIAVEWESNGQPENNYKTTPPV
LDSDGSFFLYSRLTVDKSRWQEGNVFSCSVMHEALHNHYTQKSLSLSPG;
CHA.9.547.18 VH Clambda-VL-CH1 Crossmab hIgG4
Fc Y354C E356D M348L T366W Knob

(SEQ ID NO: 3656)

EVQLVESGGGLVQPGGSLRLSCAASGFTFSSYIMSWVRQAPGKGLEWVAT
ISGGSKGQYYADSVKGRFTISRDNSKNTLYLQMNSLRAEDTAVYYCAKWL
LSYYAMDYWGQGTLVTVSSASVAAPSVFIFPPSDEQLKSGTASVVCLLNN
FYPREAKVQWKVDNALQSGNSQESVTEQDSKDSTYSLSSTLTLSKADYEK
HKVYACEVTHQGLSSPVTKSFNRGECESKYGPPCPPCPAPEFLGGPSVFL
FPPKPKDTLMISRTPEVTCVVVDVSQEDPEVQFNWYVDGVEVHNAKTKPR
EEQFNSTYRVVSVLTVLHQDWLNGKEYKCKVSNKGLPSSIEKTISKAKGQ
PREPQVYTLPPCQDELTKNQVSLWCLVKGFYPSDIAVEWESNGQPENNYK
TTPPVLDSDGSFFLYSRLTVDKSRWQEGNVFSCSVMHEALHNHYTQKSLS
LSPG;
and
CHA.9.547.18 VH hIgG4 Fc Y354C E356D M348L
T366W Knob

(SEQ ID NO: 3607)

EVQLVESGGGLVQPGGSLRLSCAASGFTFSSYIMSWVRQAPGKGLEWVAT
ISGGSKGQYYADSVKGRFTISRDNSKNTLYLQMNSLRAEDTAVYYCAKWL
LSYYAMDYWGQGTLVTVSSASASTKGPSVFPLAPCSRSTSESTAALGCLV
KDYFPEPVTVSWNSGALTSGVHTFPAVLQSSGLYSLSSVVTVPSSSLGTK
TYTCNVDHKPSNTKVDKRVESKYGPPCPPCPAPEFLGGPSVFLFPPKPKD
TLMISRTPEVTCVVVDVSQEDPEVQFNWYVDGVEVHNAKTKPREEQFNST
YRVVSVLTVLHQDWLNGKEYKCKVSNKGLPSSIEKTISKAKGQPREPQVY
TLPPCQDELTKNQVSLWCLVKGFYPSDIAVEWESNGQPENNYKTTPPVLD
SDGSFFLYSRLTVDKSRWQEGNVFSCSVMHEALHNHYTQKSLSLSPG.

[0513] In some embodiments, the anti-PVRIG portion of the anti-PVRIG/anti-TIGIT bispecific antibody comprises the following anti-PVRIG sequence

CHA.7.518.1 VH Clambda-VL-CH1 Crossmab hIgG4
Fc Y354C E356D M348L T366W Knob

(SEQ ID NO: 3657)

QVQLVQSGAEVKKPGASVKVSCKASGYTFTDYNINWVRQAPGQGLEWMGY
IYPYIGGSGYAQKFQGRVTMTRDTSTSTVYMELSSLRSEDTAVYYCARED
KTARNAMDYWGQGTLVTVSSASVAAPSVFIFPPSDEQLKSGTASVVCLLN
NFYPREAKVQWKVDNALQSGNSQESVTEQDSKDSTYSLSSTLTLSKADYE
KHKVYACEVTHQGLSSPVTKSFNRGECESKYGPPCPPCPAPEFLGGPSVF
LFPPKPKDTLMISRTPEVTCVVVDVSQEDPEVQFNWYVDGVEVHNAKTKP
REEQFNSTYRVVSVLTVLHQDWLNGKEYKCKVSNKGLPSSIEKTISKAKG
QPREPQVYTLPPCQDELTKNQVSLWCLVKGFYPSDIAVEWESNGQPENNY
KTTPPVLDSDGSFFLYSRLTVDKSRWQEGNVFSCSVMHEALHNHYTQKSL
SLSPG;

and the anti-TIGIT portion of the anti-PVRIG/anti-TIGIT bispecific antibody comprises an anti-TIGIT sequence selected from the group consisting of the following sequences:

CPA.9.086 VH Clambda-VL-CH1 Crossmab hIgG4 Fc
Y349C E356D L358L T366S L368A Y407V Hole

(SEQ ID NO: 3477)

EVQLVETGGGLIQPGRSLRLSCAASGFTFSSYAMHWVRQAPGKGLEWVAV
ISYAGEVKYYADSVKGRFTISRDNSKNTLYLQMNSLRAEDTAVYYCARDP
LPLHYYGMDVWGQGTTVTVSSASGQPKAAPSVTLFPPSSEELQANKATLV
CLISDFYPGAVTVAWKADSSPVKAGVETTTPSKQSNNKYAASSYLSLTPE
QWKSHRSYSCQVTHEGSTVEKTVAPTECSESKYGPPCPPCPAPEFLGGPS
VFLFPPKPKDTLMISRTPEVTCVVVDVSQEDPEVQFNWYVDGVEVHNAKT
KPREEQFNSTYRVVSVLTVLHQDWLNGKEYKCKVSNKGLPSSIEKTISKA
KGQPREPQVCTLPPSQDELTKNQVSLSCAVKGFYPSDIAVEWESNGQPEN
NYKTTPPVLDSDGSFFLVSRLTVDKSRWQEGNVFSCSVMHEALHNHYTQK
SLSLSPG;
CPA.9.086 VH hIgG4 Fc Y349C E356D L358L T366S
L368A Y407V Hole

(SEQ ID NO: 3497)

EVQLVETGGGLIQPGRSLRLSCAASGFTFSSYAMHWVRQAPGKGLEWVAV
ISYAGEVKYYADSVKGRFTISRDNSKNTLYLQMNSLRAEDTAVYYCARDP
LPLHYYGMDVWGQGTTVTVSSASASTKGPSVFPLAPCSRSTSESTAALGC
LVKDYFPEPVTVSWNSGALTSGVHTFPAVLQSSGLYSLSSVVTVPSSSLG
TKTYTCNVDHKPSNTKVDKRVESKYGPPCPPCPAPEFLGGPSVFLFPPKP
KDTLMISRTPEVTCVVVDVSQEDPEVQFNWYVDGVEVHNAKTKPREEQFN
STYRVVSVLTVLHQDWLNGKEYKCKVSNKGLPSSIEKTISKAKGQPREPQ
VCTLPPSQDELTKNQVSLSCAVKGFYPSDIAVEWESNGQPENNYKTTPPV
LDSDGSFFLVSRLTVDKSRWQEGNVFSCSVMHEALHNHYTQKSLSLSPG;
CHA.9.547.18 VH Clambda-VL-CH1 Crossmab hIgG4
Fc Y349C E356D L358L T366S L368A Y407V Hole

(SEQ ID NO: 3658)

EVQLVESGGGLVQPGGSLRLSCAASGFTFSSYIMSWVRQAPGKGLEWVAT
ISGGSKGQYYADSVKGRFTISRDNSKNTLYLQMNSLRAEDTAVYYCAKWL
LSYYAMDYWGQGTLVTVSSASVAAPSVFIFPPSDEQLKSGTASVVCLLNN
FYPREAKVQWKVDNALQSGNSQESVTEQDSKDSTYSLSSTLTLSKADYEK
HKVYACEVTHQGLSSPVTKSFNRGECESKYGPPCPPCPAPEFLGGPSVFL
FPPKPKDTLMISRTPEVTCVVVDVSQEDPEVQFNWYVDGVEVHNAKTKPR
EEQFNSTYRVVSVLTVLHQDWLNGKEYKCKVSNKGLPSSIEKTISKAKGQ
PREPQVCTLPPSQDELTKNQVSLSCAVKGFYPSDIAVEWESNGQPENNYK
TTPPVLDSDGSFFLVSRLTVDKSRWQEGNVFSCSVMHEALHNHYTQKSLS
LSPG;
and
CHA.9.547.18 VH hIgG4 Fc Y349C E356D L358L
T366S L368A Y407V Hole

(SEQ ID NO: 3597)

EVQLVESGGGLVQPGGSLRLSCAASGFTFSSYIMSWVRQAPGKGLEWVAT
ISGGSKGQYYADSVKGRFTISRDNSKNTLYLQMNSLRAEDTAVYYCAKWL
LSYYAMDYWGQGTLVTVSSASASTKGPSVFPLAPCSRSTSESTAALGCLV
KDYFPEPVTVSWNSGALTSGVHTFPAVLQSSGLYSLSSVVTVPSSSLGTK
TYTCNVDHKPSNTKVDKRVESKYGPPCPPCPAPEFLGGPSVFLFPPKPKD
TLMISRTPEVTCVVVDVSQEDPEVQFNWYVDGVEVHNAKTKPREEQFNST
YRVVSVLTVLHQDWLNGKEYKCKVSNKGLPSSIEKTISKAKGQPREPQVC
TLPPSQDELTKNQVSLSCAVKGFYPSDIAVEWESNGQPENNYKTTPPVLD
SDGSFFLVSRLTVDKSRWQEGNVFSCSVMHEALHNHYTQKSLSLSPG.

[0514] In some embodiments, the anti-PVRIG portion of the anti-PVRIG/anti-TIGIT bispecific antibody comprises the following anti-PVRIG sequence

CHA.7.518.1 VH hIgG4 Fc Y349C E356D L358L
T366S L368A Y407V Hole

(SEQ ID NO: 3297)

QVQLVQSGAEVKKPGASVKVSCKASGYTFTDYNINWVRQAPGQGLEWMGY
IYPYIGGSGYAQKFQGRVTMTRDTSTSTVYMELSSLRSEDTAVYYCARED
KTARNAMDYWGQGTLVTVSSASASTKGPSVFPLAPCSRSTSESTAALGCL
VKDYFPEPVTVSWNSGALTSGVHTFPAVLQSSGLYSLSSVVTVPSSSLGT
KTYTCNVDHKPSNTKVDKRVESKYGPPCPPCPAPEFLGGPSVFLFPPKPK
DTLMISRTPEVTCVVVDVSQEDPEVQFNWYVDGVEVHNAKTKPREEQFNS
TYRVVSVLTVLHQDWLNGKEYKCKVSNKGLPSSIEKTISKAKGQPREPQV
CTLPPSQDELTKNQVSLSCAVKGFYPSDIAVEWESNGQPENNYKTTPPVL
DSDGSFFLVSRLTVDKSRWQEGNVFSCSVMHEALHNHYTQKSLSLSPG;

and the anti-TIGIT portion of the anti-PVRIG/anti-TIGIT bispecific antibody comprises an anti-TIGIT sequence selected from the group consisting of the following sequences:

CPA.9.086 VH Clambda-VL-CH1 Crossmab hIgG4
Fc Y354C E356D M348L T366W Knob

(SEQ ID NO: 3487)

EVQLVETGGGLIQPGRSLRLSCAASGFTFSSYAMHWVRQAPGKGLEWVAV
ISYAGEVKYYADSVKGRFTISRDNSKNTLYLQMNSLRAEDTAVYYCARDP
LPLHYYGMDVWGQGTTVTVSSASGQPKAAPSVTLFPPSSEELQANKATLV
CLISDFYPGAVTVAWKADSSPVKAGVETTTPSKQSNNKYAASSYLSLTPE
QWKSHRSYSCQVTHEGSTVEKTVAPTECSESKYGPPCPPCPAPEFLGGPS
VFLFPPKPKDTLMISRTPEVTCVVVDVSQEDPEVQFNWYVDGVEVHNAKT
KPREEQFNSTYRVVSVLTVLHQDWLNGKEYKCKVSNKGLPSSIEKTISKA
KGQPREPQVYTLPPCQDELTKNQVSLWCLVKGFYPSDIAVEWESNGQPEN
NYKTTPPVLDSDGSFFLYSRLTVDKSRWQEGNVFSCSVMHEALHNHYTQK
SLSLSPG;
CPA.9.086 VH hIgG4 Fc Y354C E356D M348L
T366W Knob

(SEQ ID NO: 3507)

EVQLVETGGGLIQPGRSLRLSCAASGFTFSSYAMHWVRQAPGKGLEWVAV
ISYAGEVKYYADSVKGRFTISRDNSKNTLYLQMNSLRAEDTAVYYCARDP
LPLHYYGMDVWGQGTTVTVSSASASTKGPSVFPLAPCSRSTSESTAALGC
LVKDYFPEPVTVSWNSGALTSGVHTFPAVLQSSGLYSLSSVVTVPSSSLG
TKTYTCNVDHKPSNTKVDKRVESKYGPPCPPCPAPEFLGGPSVFLFPPKP
KDTLMISRTPEVTCVVVDVSQEDPEVQFNWYVDGVEVHNAKTKPREEQFN
STYRVVSVLTVLHQDWLNGKEYKCKVSNKGLPSSIEKTISKAKGQPREPQ
VYTLPPCQDELTKNQVSLWCLVKGFYPSDIAVEWESNGQPENNYKTTPPV
LDSDGSFFLYSRLTVDKSRWQEGNVFSCSVMHEALHNHYTQKSLSLSPG;
CHA.9.547.18 VH Clambda-VL-CH1 Crossmab
hIgG4 Fc Y354C E356D M348L T366W Knob

(SEQ ID NO: 3659)

EVQLVESGGGLVQPGGSLRLSCAASGFTFSSYIMSWVRQAPGKGLEWVAT
ISGGSKGQYYADSVKGRFTISRDNSKNTLYLQMNSLRAEDTAVYYCAKWL
LSYYAMDYWGQGTLVTVSSASVAAPSVFIFPPSDEQLKSGTASVVCLLNN
FYPREAKVQWKVDNALQSGNSQESVTEQDSKDSTYSLSSTLTLSKADYEK
HKVYACEVTHQGLSSPVTKSFNRGECESKYGPPCPPCPAPEFLGGPSVFL
FPPKPKDTLMISRTPEVTCVVVDVSQEDPEVQFNWYVDGVEVHNAKTKPR
EEQFNSTYRVVSVLTVLHQDWLNGKEYKCKVSNKGLPSSIEKTISKAKGQ
PREPQVYTLPPCQDELTKNQVSLWCLVKGFYPSDIAVEWESNGQPENNYK
TTPPVLDSDGSFFLYSRLTVDKSRWQEGNVFSCSVMHEALHNHYTQKSLS
LSPG;
and
CHA.9.547.18 VH hIgG4 Fc Y354C E356D M348L
T366W Knob

(SEQ ID NO: 3607)

EVQLVESGGGLVQPGGSLRLSCAASGFTFSSYIMSWVRQAPGKGLEWVAT
ISGGSKGQYYADSVKGRFTISRDNSKNTLYLQMNSLRAEDTAVYYCAKWL
LSYYAMDYWGQGTLVTVSSASASTKGPSVFPLAPCSRSTSESTAALGCLV
KDYFPEPVTVSWNSGALTSGVHTFPAVLQSSGLYSLSSVVTVPSSSLGTK
TYTCNVDHKPSNTKVDKRVESKYGPPCPPCPAPEFLGGPSVFLFPPKPKD
TLMISRTPEVTCVVVDVSQEDPEVQFNWYVDGVEVHNAKTKPREEQFNST
YRVVSVLTVLHQDWLNGKEYKCKVSNKGLPSSIEKTISKAKGQPREPQVY
TLPPCQDELTKNQVSLWCLVKGFYPSDIAVEWESNGQPENNYKTTPPVLD
SDGSFFLYSRLTVDKSRWQEGNVFSCSVMHEALHNHYTQKSLSLSPG.

[0515] In some embodiments, the anti-PVRIG portion of the anti-PVRIG/anti-TIGIT bispecific antibody comprises the following anti-PVRIG sequence

CHA.7.518.1 VH hIgG4 Fc Y354C E356D M348L
T366W Knob

(SEQ ID NO: 3307)

QVQLVQSGAEVKKPGASVKVSCKASGYTFTDYNINWVRQAPGQGLEWMGY
IYPYIGGSGYAQKFQGRVTMTRDTSTSTVYMELSSLRSEDTAVYYCARED
KTARNAMDYWGQGTLVTVSSASASTKGPSVFPLAPCSRSTSESTAALGCL
VKDYFPEPVTVSWNSGALTSGVHTFPAVLQSSGLYSLSSVVTVPSSSLGT
KTYTCNVDHKPSNTKVDKRVESKYGPPCPPCPAPEFLGGPSVFLFPPKPK
DTLMISRTPEVTCVVVDVSQEDPEVQFNWYVDGVEVHNAKTKPREEQFNS
TYRVVSVLTVLHQDWLNGKEYKCKVSNKGLPSSIEKTISKAKGQPREPQV
YTLPPCQDELTKNQVSLWCLVKGFYPSDIAVEWESNGQPENNYKTTPPVL
DSDGSFFLYSRLTVDKSRWQEGNVFSCSVMHEALHNHYTQKSLSLSPG;

and the anti-TIGIT portion of the anti-PVRIG/anti-TIGIT bispecific antibody comprises an anti-TIGIT sequence selected from the group consisting of the following sequences:

CPA.9.086 VH Clambda-VL-CH1 Crossmab hIgG4
Fc Y349C E356D L358L T366S L368A Y407V Hole

(SEQ ID NO: 3477)

EVQLVETGGGLIQPGRSLRLSCAASGFTFSSYAMHWVRQAPGKGLEWVAV
ISYAGEVKYYADSVKGRFTISRDNSKNTLYLQMNSLRAEDTAVYYCARDP
LPLHYYGMDVWGQGTTVTVSSASGQPKAAPSVTLFPPSSEELQANKATLV
CLISDFYPGAVTVAWKADSSPVKAGVETTTPSKQSNNKYAASSYLSLTPE
QWKSHRSYSCQVTHEGSTVEKTVAPTECSESKYGPPCPPCPAPEFLGGPS
VFLFPPKPKDTLMISRTPEVTCVVVDVSQEDPEVQFNWYVDGVEVHNAKT
KPREEQFNSTYRVVSVLTVLHQDWLNGKEYKCKVSNKGLPSSIEKTISKA
KGQPREPQVCTLPPSQDELTKNQVSLSCAVKGFYPSDIAVEWESNGQPEN
NYKTTPPVLDSDGSFFLVSRLTVDKSRWQEGNVFSCSVMHEALHNHYTQK
SLSLSPG;
CPA.9.086 VH hIgG4 Fc Y349C E356D L358L
T366S L368A Y407V Hole

(SEQ ID NO: 3497)

EVQLVETGGGLIQPGRSLRLSCAASGFTFSSYAMHWVRQAPGKGLEWVAV
ISYAGEVKYYADSVKGRFTISRDNSKNTLYLQMNSLRAEDTAVYYCARDP
LPLHYYGMDVWGQGTTVTVSSASASTKGPSVFPLAPCSRSTSESTAALGC
LVKDYFPEPVTVSWNSGALTSGVHTFPAVLQSSGLYSLSSVVTVPSSSLG
TKTYTCNVDHKPSNTKVDKRVESKYGPPCPPCPAPEFLGGPSVFLFPPKP
KDTLMISRTPEVTCVVVDVSQEDPEVQFNWYVDGVEVHNAKTKPREEQFN
STYRVVSVLTVLHQDWLNGKEYKCKVSNKGLPSSIEKTISKAKGQPREPQ
VCTLPPSQDELTKNQVSLSCAVKGFYPSDIAVEWESNGQPENNYKTTPPV
LDSDGSFFLVSRLTVDKSRWQEGNVFSCSVMHEALHNHYTQKSLSLSPG;
CHA.9.547.18 VH Clambda-VL-CH1 Crossmab hIgG4
Fc Y349C E356D L358L T366S L368A Y407V Hole

(SEQ ID NO: 3660)

EVQLVESGGGLVQPGGSLRLSCAASGFTFSSYIMSWVRQAPGKGLEWVAT
ISGGSKGQYYADSVKGRFTISRDNSKNTLYLQMNSLRAEDTAVYYCAKWL
LSYYAMDYWGQGTLVTVSSASVAAPSVFIFPPSDEQLKSGTASVVCLLNN
FYPREAKVQWKVDNALQSGNSQESVTEQDSKDSTYSLSSTLTLSKADYEK
HKVYACEVTHQGLSSPVTKSFNRGECESKYGPPCPPCPAPEFLGGPSVFL
FPPKPKDTLMISRTPEVTCVVVDVSQEDPEVQFNWYVDGVEVHNAKTKPR
EEQFNSTYRVVSVLTVLHQDWLNGKEYKCKVSNKGLPSSIEKTISKAKGQ
PREPQVCTLPPSQDELTKNQVSLSCAVKGFYPSDIAVEWESNGQPENNYK
TTPPVLDSDGSFFLVSRLTVDKSRWQEGNVFSCSVMHEALHNHYTQKSLS
LSPG;
and
CHA.9.547.18 VH hIgG4 Fc Y349C E356D L358L
T366S L368A Y407V Hole

(SEQ ID NO: 3597)

EVQLVESGGGLVQPGGSLRLSCAASGFTFSSYIMSWVRQAPGKGLEWVAT
ISGGSKGQYYADSVKGRFTISRDNSKNTLYLQMNSLRAEDTAVYYCAKWL
LSYYAMDYWGQGTLVTVSSASASTKGPSVFPLAPCSRSTSESTAALGCLV
KDYFPEPVTVSWNSGALTSGVHTFPAVLQSSGLYSLSSVVTVPSSSLGTK
TYTCNVDHKPSNTKVDKRVESKYGPPCPPCPAPEFLGGPSVFLFPPKPKD
TLMISRTPEVTCVVVDVSQEDPEVQFNWYVDGVEVHNAKTKPREEQFNST
YRVVSVLTVLHQDWLNGKEYKCKVSNKGLPSSIEKTISKAKGQPREPQVC
TLPPSQDELTKNQVSLSCAVKGFYPSDIAVEWESNGQPENNYKTTPPVLD
SDGSFFLVSRLTVDKSRWQEGNVFSCSVMHEALHNHYTQKSLSLSPG.

[0516] In some embodiments, the anti-PVRIG portion of the anti-PVRIG/anti-TIGIT bispecific antibody comprises the following anti-PVRIG sequence

CHA.7.518.4 scFv (VL-linker-VH) hIgG4 Variant 1

(SEQ ID NO: 3317)

DIQMTQSPSSLSASVGDRVTITCRVSENIYDVLAWYQQKPGKAPKLLIYE
ATNLAEGVPSRFSGSGSGTDFTLTISSLQPEDFATYYCQHFWGTPYTFGQ
GTKLEIKggggsggggsggggsQVQLVQSGAEVKKPGASVKVSCKASGYT
FTDYNINWVRQAPGQGLEWMGYIYPYIGGSGYAQKFQGRVTMTRDTSTST
VYMELSSLRSEDTAVYYCAREDKTARNAMDYWGQGTLVTVSSESKYGPPC
PPCPAPPVA()GPSVFLFPPKPKDTLMISRTPEVTCVVVDVKQEDPEVQF
NWYVDGVEVHNAKTKPREEQFNSTYRVVSVLTVLHQDWLNGKEYKCKVSN
KGLPSSIEKTISKAKGQPREPQVYTLPPSQEQMTKNQVKLTCLVKGFYPS
DIAVEWESNGQPENNYKTTPPVLDSDGSFFLYSRLTVDKSRWQEGNVFSC
SVMHEALHNHYTQKSLSLSPG;

and the anti-TIGIT portion of the anti-PVRIG/anti-TIGIT bispecific antibody comprises an anti-TIGIT sequence selected from the group consisting of the following sequences:

CPA.9.086 scFv (VL-linker-VH) hIgG4 Variant 2

(SEQ ID NO: 3437)

QSALTQPRSASGNPGQRVTISCSGSSSNMGRRPVNWYQQIPGTAPKLLIY
SQNQRPSGVPDRFSGSQSGTSASLTISGLQSEDEAEYFCAVWDDIGRVLQ
LGGGTQLAVLggggsggggsggggsEVQLVETGGGLIQPGRSLRLSCAAS
GFTFSSYAMHWVRQAPGKGLEWVAVISYAGEVKYYADSVKGRFTISRDNS
KNTLYLQMNSLRAEDTAVYYCARDPLPLHYYGMDVWGQGTTVTVSSESKY
GPPCPPCPAPPVA()GPSVFLFPPKPKDTLMISRTPEVTCVVVDVKQEDP
EVQFNWYVDGVEVHNAKTKPREEEFNSTYRVVSVLTVLHQDWLNGKEYKC
KVSNKGLPSSIEKTISKAKGQPREPQVYTLPPSQEEMTKNQVSLTCDVSG
FYPSDIAVEWESDGQPENNYKTTPPVLDSDGSFFLYSRLTVDKSRWEEGD
VFSCSVMHEALHNHYTQKSLSLSPG;
CPA.9.086 scFv (VH-linker-VL) hIgG4 Variant 2

(SEQ ID NO: 3447)

EVQLVETGGGLIQPGRSLRLSCAASGFTFSSYAMHWVRQAPGKGLEWVAV
ISYAGEVKYYADSVKGRFTISRDNSKNTLYLQMNSLRAEDTAVYYCARDP
LPLHYYGMDVWGQGTTVTVSSggggsggggsggggsQSALTQPRSASGNP
GQRVTISCSGSSSNMGRRPVNWYQQIPGTAPKLLIYSQNQRPSGVPDRFS
GSQSGTSASLTISGLQSEDEAEYFCAVWDDIGRVLQLGGGTQLAVLESKY
GPPCPPCPAPPVA()GPSVFLFPPKPKDTLMISRTPEVTCVVVDVKQEDP
EVQFNWYVDGVEVHNAKTKPREEEFNSTYRVVSVLTVLHQDWLNGKEYKC
KVSNKGLPSSIEKTISKAKGQPREPQVYTLPPSQEEMTKNQVSLTCDVSG
FYPSDIAVEWESDGQPENNYKTTPPVLDSDGSFFLYSRLTVDKSRWEEGD
VFSCSVMHEALHNHYTQKSLSLSPG;
CPA.9.086 hIgG4 Variant 2

(SEQ ID NO: 3467)

EVQLVETGGGLIQPGRSLRLSCAASGFTFSSYAMHWVRQAPGKGLEWVAV
ISYAGEVKYYADSVKGRFTISRDNSKNTLYLQMNSLRAEDTAVYYCARDP
LPLHYYGMDVWGQGTTVTVSSASTKGPSVFPLAPCSRSTSESTAALGCLV
KDYFPEPVTVSWNSGALTSGVHTFPAVLQSSGLYSLSSVVTVPSSSLGTK
TYTCNVDHKPSDTKVDKRVESKYGPPCPPCPAPPVA()GPSVFLFPPKPK
DTLMISRTPEVTCVVVDVKQEDPEVQFNWYVDGVEVHNAKTKPREEEFNS
TYRVVSVLTVLHQDWLNGKEYKCKVSNKGLPSSIEKTISKAKGQPREPQV
YTLPPSQEEMTKNQVSLTCDVSGFYPSDIAVEWESDGQPENNYKTTPPVL
DSDGSFFLYSRLTVDKSRWEEGDVFSCSVMHEALHNHYTQKSLSLSPG;
CHA.9.547.18 scFv (VL-linker-VH) hIgG4 Variant 2

(SEQ ID NO: 3537)

DIQMTQSPSSLSASVGDRITITCRASQSMAIWLSWYQQKPGKAPKLLIYK
ASKSHTGVPSRFSGSGSGTDFTLTISSLQPEDFATYYCQQGQSYPYTFGQ
GTKLEIKggggsggggsggggsEVQLVESGGGLVQPGGSLRLSCAASGFT
FSSYIMSWVRQAPGKGLEWVATISGGSKGQYYADSVKGRFTISRDNSKNT
LYLQMNSLRAEDTAVYYCAKWLLSYYAMDYWGQGTLVTVSSESKYGPPCP
PCPAPPVA()GPSVFLFPPKPKDTLMISRTPEVTCVVVDVKQEDPEVQFN
WYVDGVEVHNAKTKPREEEFNSTYRVVSVLTVLHQDWLNGKEYKCKVSNK
GLPSSIEKTISKAKGQPREPQVYTLPPSQEEMTKNQVSLTCDVSGFYPSD
IAVEWESDGQPENNYKTTPPVLDSDGSFFLYSRLTVDKSRWEEGDVFSCS
VMHEALHNHYTQKSLSLSPG;
CHA.9.547.18 scFv (VH-linker-VL) hIgG4 Variant 2

(SEQ ID NO: 3547)

EVQLVESGGGLVQPGGSLRLSCAASGFTFSSYIMSWVRQAPGKGLEWVAT
ISGGSKGQYYADSVKGRFTISRDNSKNTLYLQMNSLRAEDTAVYYCAKWL
LSYYAMDYWGQGTLVTVSSggggsggggsggggsDIQMTQSPSSLSASVG
DRITITCRASQSMAIWLSWYQQKPGKAPKLLIYKASKSHTGVPSRFSGSG
SGTDFTLTISSLQPEDFATYYCQQGQSYPYTFGQGTKLEIKESKYGPPCP
PCPAPPVA()GPSVFLFPPKPKDTLMISRTPEVTCVVVDVKQEDPEVQFN
WYVDGVEVHNAKTKPREEEFNSTYRVVSVLTVLHQDWLNGKEYKCKVSNK
GLPSSIEKTISKAKGQPREPQVYTLPPSQEEMTKNQVSLTCDVSGFYPSD
IAVEWESDGQPENNYKTTPPVLDSDGSFFLYSRLTVDKSRWEEGDVFSCS
VMHEALHNHYTQKSLSLSPG;
and
CHA.9.547.18 hIgG4 Variant 2

(SEQ ID NO: 3567)

EVQLVESGGGLVQPGGSLRLSCAASGFTFSSYIMSWVRQAPGKGLEWVAT
ISGGSKGQYYADSVKGRFTISRDNSKNTLYLQMNSLRAEDTAVYYCAKWL
LSYYAMDYWGQGTLVTVSSASTKGPSVFPLAPCSRSTSESTAALGCLVKD
YFPEPVTVSWNSGALTSGVHTFPAVLQSSGLYSLSSVVTVPSSSLGTKTY
TCNVDHKPSDTKVDKRVESKYGPPCPPCPAPPVA()GPSVFLFPPKPKDT
LMISRTPEVTCVVVDVKQEDPEVQFNWYVDGVEVHNAKTKPREEEFNSTY
RVVSVLTVLHQDWLNGKEYKCKVSNKGLPSSIEKTISKAKGQPREPQVYT
LPPSQEEMTKNQVSLTCDVSGFYPSDIAVEWESDGQPENNYKTTPPVLDS
DGSFFLYSRLTVDKSRWEEGDVFSCSVMHEALHNHYTQKSLSLSPG.

[0517] In some embodiments, the anti-PVRIG portion of the anti-PVRIG/anti-TIGIT bispecific antibody comprises the following anti-PVRIG sequence

CHA.7.518.4 scFv (VH-linker-VL) hIgG4 Variant 1

(SEQ ID NO: 3327)

QVQLVQSGAEVKKPGASVKVSCKASGYTFTDYNINWVRQAPGQGLEWMGY
IYPYIGGSGYAQKFQGRVTMTRDTSTSTVYMELSSLRSEDTAVYYCARED
KTARNAMDYWGQGTLVTVSSggggsggggsggggsDIQMTQSPSSLSASV
GDRVTITCRVSENIYDVLAWYQQKPGKAPKLLIYEATNLAEGVPSRFSGS
GSGTDFTLTISSLQPEDFATYYCQHFWGTPYTFGQGTKLEIKESKYGPPC
PPCPAPPVA()GPSVFLFPPKPKDTLMISRTPEVTCVVVDVKQEDPEVQF
NWYVDGVEVHNAKTKPREEQFNSTYRVVSVLTVLHQDWLNGKEYKCKVSN
KGLPSSIEKTISKAKGQPREPQVYTLPPSQEQMTKNQVKLTCLVKGFYPS
DIAVEWESNGQPENNYKTTPPVLDSDGSFFLYSRLTVDKSRWQEGNVFSC
SVMHEALHNHYTQKSLSLSPG;

and the anti-TIGIT portion of the anti-PVRIG/anti-TIGIT bispecific antibody comprises an anti-TIGIT sequence selected from the group consisting of the following sequences:

CPA.9.086 scFv (VL-linker-VH) hIgG4 Variant 2

(SEQ ID NO: 3437)

QSALTQPRSASGNPGQRVTISCSGSSSNMGRRPVNWYQQIPGTAPKLLIY
SQNQRPSGVPDRFSGSQSGTSASLTISGLQSEDEAEYFCAVWDDIGRVLQ
LGGGTQLAVLggggsggggsggggsEVQLVETGGGLIQPGRSLRLSCAAS
GFTFSSYAMHWVRQAPGKGLEWVAVISYAGEVKYYADSVKGRFTISRDNS
KNTLYLQMNSLRAEDTAVYYCARDPLPLHYYGMDVWGQGTTVTVSSESKY
GPPCPPCPAPPVA()GPSVFLFPPKPKDTLMISRTPEVTCVVVDVKQEDP
EVQFNWYVDGVEVHNAKTKPREEEFNSTYRVVSVLTVLHQDWLNGKEYKC
KVSNKGLPSSIEKTISKAKGQPREPQVYTLPPSQEEMTKNQVSLTCDVSG
FYPSDIAVEWESDGQPENNYKTTPPVLDSDGSFFLYSRLTVDKSRWEEGD
VFSCSVMHEALHNHYTQKSLSLSPG;
CPA.9.086 scFv (VH-linker-VL) hIgG4 Variant 2

(SEQ ID NO: 3447)

EVQLVETGGGLIQPGRSLRLSCAASGFTFSSYAMHWVRQAPGKGLEWVAV
ISYAGEVKYYADSVKGRFTISRDNSKNTLYLQMNSLRAEDTAVYYCARDP
LPLHYYGMDVWGQGTTVTVSSggggsggggsggggsQSALTQPRSASGNP
GQRVTISCSGSSSNMGRRPVNWYQQIPGTAPKLLIYSQNQRPSGVPDRFS
GSQSGTSASLTISGLQSEDEAEYFCAVWDDIGRVLQLGGGTQLAVLESKY
GPPCPPCPAPPVA()GPSVFLFPPKPKDTLMISRTPEVTCVVVDVKQEDP
EVQFNWYVDGVEVHNAKTKPREEEFNSTYRVVSVLTVLHQDWLNGKEYKC
KVSNKGLPSSIEKTISKAKGQPREPQVYTLPPSQEEMTKNQVSLTCDVSG
FYPSDIAVEWESDGQPENNYKTTPPVLDSDGSFFLYSRLTVDKSRWEEGD
VFSCSVMHEALHNHYTQKSLSLSPG;
CPA.9.086 hIgG4 Variant 2

(SEQ ID NO: 3467)

EVQLVETGGGLIQPGRSLRLSCAASGFTFSSYAMHWVRQAPGKGLEWVAV
ISYAGEVKYYADSVKGRFTISRDNSKNTLYLQMNSLRAEDTAVYYCARDP
LPLHYYGMDVWGQGTTVTVSSASTKGPSVFPLAPCSRSTSESTAALGCLV
KDYFPEPVTVSWNSGALTSGVHTFPAVLQSSGLYSLSSVVTVPSSSLGTK
TYTCNVDHKPSDTKVDKRVESKYGPPCPPCPAPPVA()GPSVFLFPPKPK
DTLMISRTPEVTCVVVDVKQEDPEVQFNWYVDGVEVHNAKTKPREEEFNS
TYRVVSVLTVLHQDWLNGKEYKCKVSNKGLPSSIEKTISKAKGQPREPQV
YTLPPSQEEMTKNQVSLTCDVSGFYPSDIAVEWESDGQPENNYKTTPPVL
DSDGSFFLYSRLTVDKSRWEEGDVFSCSVMHEALHNHYTQKSLSLSPG;
CHA.9.547.18 scFv (VL-linker-VH) hIgG4 Variant 2

(SEQ ID NO: 3537)

DIQMTQSPSSLSASVGDRITITCRASQSMAIWLSWYQQKPGKAPKLLIYK
ASKSHTGVPSRFSGSGSGTDFTLTISSLQPEDFATYYCQQGQSYPYTFGQ
GTKLEIKggggsggggsggggsEVQLVESGGGLVQPGGSLRLSCAASGFT
FSSYIMSWVRQAPGKGLEWVATISGGSKGQYYADSVKGRFTISRDNSKNT
LYLQMNSLRAEDTAVYYCAKWLLSYYAMDYWGQGTLVTVSSESKYGPPCP
PCPAPPVA()GPSVFLFPPKPKDTLMISRTPEVTCVVVDVKQEDPEVQFN
WYVDGVEVHNAKTKPREEEFNSTYRVVSVLTVLHQDWLNGKEYKCKVSNK
GLPSSIEKTISKAKGQPREPQVYTLPPSQEEMTKNQVSLTCDVSGFYPSD
IAVEWESDGQPENNYKTTPPVLDSDGSFFLYSRLTVDKSRWEEGDVFSCS
VMHEALHNHYTQKSLSLSPG;
CHA.9.547.18 scFv (VH-linker-VL) hIgG4 Variant 2

(SEQ ID NO: 3547)

EVQLVESGGGLVQPGGSLRLSCAASGFTFSSYIMSWVRQAPGKGLEWVAT
ISGGSKGQYYADSVKGRFTISRDNSKNTLYLQMNSLRAEDTAVYYCAKWL
LSYYAMDYWGQGTLVTVSSggggsggggsggggsDIQMTQSPSSLSASVG
DRITITCRASQSMAIWLSWYQQKPGKAPKLLIYKASKSHTGVPSRFSGSG
SGTDFTLTISSLQPEDFATYYCQQGQSYPYTFGQGTKLEIKESKYGPPCP
PCPAPPVA()GPSVFLFPPKPKDTLMISRTPEVTCVVVDVKQEDPEVQFN
WYVDGVEVHNAKTKPREEEFNSTYRVVSVLTVLHQDWLNGKEYKCKVSNK
GLPSSIEKTISKAKGQPREPQVYTLPPSQEEMTKNQVSLTCDVSGFYPSD
IAVEWESDGQPENNYKTTPPVLDSDGSFFLYSRLTVDKSRWEEGDVFSCS
VMHEALHNHYTQKSLSLSPG;
and
CHA.9.547.18 hIgG4 Variant 2

(SEQ ID NO: 3567)

EVQLVESGGGLVQPGGSLRLSCAASGFTFSSYIMSWVRQAPGKGLEWVAT
ISGGSKGQYYADSVKGRFTISRDNSKNTLYLQMNSLRAEDTAVYYCAKWL
LSYYAMDYWGQGTLVTVSSASTKGPSVFPLAPCSRSTSESTAALGCLVKD
YFPEPVTVSWNSGALTSGVHTFPAVLQSSGLYSLSSVVTVPSSSLGTKTY
TCNVDHKPSDTKVDKRVESKYGPPCPPCPAPPVA()GPSVFLFPPKPKDT
LMISRTPEVTCVVVDVKQEDPEVQFNWYVDGVEVHNAKTKPREEEFNSTY
RVVSVLTVLHQDWLNGKEYKCKVSNKGLPSSIEKTISKAKGQPREPQVYT
LPPSQEEMTKNQVSLTCDVSGFYPSDIAVEWESDGQPENNYKTTPPVLDS
DGSFFLYSRLTVDKSRWEEGDVFSCSVMHEALHNHYTQKSLSLSPG.

[0518] In some embodiments, the anti-PVRIG portion of the anti-PVRIG/anti-TIGIT bispecific antibody comprises the following anti-PVRIG sequence

CHA.7.518.4 scFv (VL-linker-VH) hIgG4 Variant 2

(SEQ ID NO: 3337)

DIQMTQSPSSLSASVGDRVTITCRVSENIYDVLAWYQQKPGKAPKLLIYE
ATNLAEGVPSRFSGSGSGTDFTLTISSLQPEDFATYYCQHFWGTPYTFGQ
GTKLEIKggggsggggsggggsQVQLVQSGAEVKKPGASVKVSCKASGYT
FTDYNINWVRQAPGQGLEWMGYIYPYIGGSGYAQKFQGRVTMTRDTSTST
VYMELSSLRSEDTAVYYCAREDKTARNAMDYWGQGTLVTVSSESKYGPPC
PPCPAPPVA()GPSVFLFPPKPKDTLMISRTPEVTCVVVDVKQEDPEVQF
NWYVDGVEVHNAKTKPREEEFNSTYRVVSVLTVLHQDWLNGKEYKCKVSN
KGLPSSIEKTISKAKGQPREPQVYTLPPSQEEMTKNQVSLTCDVSGFYPS
DIAVEWESDGQPENNYKTTPPVLDSDGSFFLYSRLTVDKSRWEEGDVFSC
SVMHEALHNHYTQKSLSLSPG;

and the anti-TIGIT portion of the anti-PVRIG/anti-TIGIT bispecific antibody comprises an anti-TIGIT sequence selected from the group consisting of the following sequences:

CPA.9.086 scFv (VL-linker-VH) hIgG4 Variant 1
(SEQ ID NO: 3417)
QSALTQPRSASGNPGQRVTISCSGSSSNMGRRPVNWYQQIPGTAPKLLIYSQNQRPSGVPDRFSGSQSGTSA
SLTISGLQSEDEAEYFCAVWDDIGRVLQLGGGTQLAVLggggsggggsggggsEVQLVETGGGLIQPGRSLR
LSCAASGFTFSSYAMHWVRQAPGKGLEWVAVISYAGEVKYYADSVKGRFTISRDNSKNTLYLQMNSLRAEDT
AVYYCARDPLPLHYYGMDVWGQGTTVTVSSESKYGPPCPPCPAPPVA()GPSVFLFPPKPKDTLMISRTPEV
TCVVVDVKQEDPEVQFNWYVDGVEVHNAKTKPREEQFNSTYRVVSVLTVLHQDWLNGKEYKCKVSNKGLPSS
IEKTISKAKGQPREPQVYTLPPSQEQMTKNQVKLTCLVKGFYPSDIAVEWESNGQPENNYKTTPPVLDSDGS
FFLYSRLTVDKSRWQEGNVFSCSVMHEALHNHYTQKSLSLSPG;
CPA.9.086 scFv (VH-linker-VL) hIgG4 Variant 1
(SEQ ID NO: 3427)
EVQLVETGGGLIQPGRSLRLSCAASGFTFSSYAMHWVRQAPGKGLEWVAVISYAGEVKYYADSVKGRFTISR
DNSKNTLYLQMNSLRAEDTAVYYCARDPLPLHYYGMDVWGQGTTVTVSSggggsggggsggggsQSALTQPR
SASGNPGQRVTISCSGSSSNMGRRPVNWYQQIPGTAPKLLIYSQNQRPSGVPDRFSGSQSGTSASLTISGLQ
SEDEAEYFCAVWDDIGRVLQLGGGTQLAVLESKYGPPCPPCPAPPVA()GPSVFLFPPKPKDTLMISRTPEV
TCVVVDVKQEDPEVQFNWYVDGVEVHNAKTKPREEQFNSTYRVVSVLTVLHQDWLNGKEYKCKVSNKGLPSS
IEKTISKAKGQPREPQVYTLPPSQEQMTKNQVKLTCLVKGFYPSDIAVEWESNGQPENNYKTTPPVLDSDGS
FFLYSRLTVDKSRWQEGNVFSCSVMHEALHNHYTQKSLSLSPG;
CPA.9.086 hIgG4 Variant 1
(SEQ ID NO: 3457)
EVQLVETGGGLIQPGRSLRLSCAASGFTFSSYAMHWVRQAPGKGLEWVAVISYAGEVKYYADSVKGRFTISR
DNSKNTLYLQMNSLRAEDTAVYYCARDPLPLHYYGMDVWGQGTTVTVSSASTKGPSVFPLAPCSRSTSESTA
ALGCLVKDYFPEPVTVSWNSGALTSGVHTFPAVLQSSGLYSLSSVVTVPSSSLGTKTYTCNVDHKPSDTKVD
KRVESKYGPPCPPCPAPPVA()GPSVFLFPPKPKDTLMISRTPEVTCVVVDVKQEDPEVQFNWYVDGVEVHN
AKTKPREEQFNSTYRVVSVLTVLHQDWLNGKEYKCKVSNKGLPSSIEKTISKAKGQPREPQVYTLPPSQEQM
TKNQVKLTCLVKGFYPSDIAVEWESNGQPENNYKTTPPVLDSDGSFFLYSRLTVDKSRWQEGNVFSCSVMHE
ALHNHYTQKSLSLSPG;
CHA.9.547.18 scFv (VL-linker-VH) hIgG4 Variant 1
(SEQ ID NO: 3517)
DIQMTQSPSSLSASVGDRITITCRASQSMAIWLSWYQQKPGKAPKLLIYKASKSHTGVPSRFSGSGSGTDFT
LTISSLQPEDFATYYCQQGQSYPYTFGQGTKLEIKggggsggggsggggsEVQLVESGGGLVQPGGSLRLSC
AASGFTFSSYIMSWVRQAPGKGLEWVATISGGSKGQYYADSVKGRFTISRDNSKNTLYLQMNSLRAEDTAVY
YCAKWLLSYYAMDYWGQGTLVTVSSESKYGPPCPPCPAPPVA()GPSVFLFPPKPKDTLMISRTPEVTCVVV
DVKQEDPEVQFNWYVDGVEVHNAKTKPREEQFNSTYRVVSVLTVLHQDWLNGKEYKCKVSNKGLPSSIEKTI
SKAKGQPREPQVYTLPPSQEQMTKNQVKLTCLVKGFYPSDIAVEWESNGQPENNYKTTPPVLDSDGSFFLYS
RLTVDKSRWQEGNVFSCSVMHEALHNHYTQKSLSLSPG;
CHA.9.547.18 scFv (VH-linker-VL) hIgG4 Variant 1
(SEQ ID NO: 3527)
EVQLVESGGGLVQPGGSLRLSCAASGFTFSSYIMSWVRQAPGKGLEWVATISGGSKGQYYADSVKGRFTISR
DNSKNTLYLQMNSLRAEDTAVYYCAKWLLSYYAMDYWGQGTLVTVSSggggsggggsggggsDIQMTQSPSS
LSASVGDRITITCRASQSMAIWLSWYQQKPGKAPKLLIYKASKSHTGVPSRFSGSGSGTDFTLTISSLQPED
FATYYCQQGQSYPYTFGQGTKLEIKESKYGPPCPPCPAPPVA()GPSVFLFPPKPKDTLMISRTPEVTCVVV
DVKQEDPEVQFNWYVDGVEVHNAKTKPREEQFNSTYRVVSVLTVLHQDWLNGKEYKCKVSNKGLPSSIEKTI
SKAKGQPREPQVYTLPPSQEQMTKNQVKLTCLVKGFYPSDIAVEWESNGQPENNYKTTPPVLDSDGSFFLYS
RLTVDKSRWQEGNVFSCSVMHEALHNHYTQKSLSLSPG;
and
CHA.9.547.18 hIgG4 Variant 1
(SEQ ID NO: 3557)
EVQLVESGGGLVQPGGSLRLSCAASGFTFSSYIMSWVRQAPGKGLEWVATISGGSKGQYYADSVKGRFTISR
DNSKNTLYLQMNSLRAEDTAVYYCAKWLLSYYAMDYWGQGTLVTVSSASTKGPSVFPLAPCSRSTSESTAAL
GCLVKDYFPEPVTVSWNSGALTSGVHTFPAVLQSSGLYSLSSVVTVPSSSLGTKTYTCNVDHKPSNTKVDKR
VESKYGPPCPPCPAPPVA()GPSVFLFPPKPKDTLMISRTPEVTCVVVDVKQEDPEVQFNWYVDGVEVHNAK
TKPREEQFNSTYRVVSVLTVLHQDWLNGKEYKCKVSNKGLPSSIEKTISKAKGQPREPQVYTLPPSQEQMTK
NQVKLTCLVKGFYPSDIAVEWESNGQPENNYKTTPPVLDSDGSFFLYSRLTVDKSRWQEGNVFSCSVMHEAL
HNHYTQKSLSLSPG.

[0519] In some embodiments, the anti-PVRIG portion of the anti-PVRIG/anti-TIGIT bispecific antibody comprises the following anti-PVRIG sequence

CHA.7.518.4 scFv (VH-linker-VL) hIgG4 Variant 2

(SEQ ID NO: 3347)

QVQLVQSGAEVKKPGASVKVSCKASGYTFTDYNINWVRQAPGQGLEWMGY
IYPYIGGSGYAQKFQGRVTMTRDTSTSTVYMELSSLRSEDTAVYYCARED
KTARNAMDYWGQGTLVTVSSggggsggggsggggsDIQMTQSPSSLSASV
GDRVTITCRVSENIYDVLAWYQQKPGKAPKLLIYEATNLAEGVPSRFSGS
GSGTDFTLTISSLQPEDFATYYCQHFWGTPYTFGQGTKLEIKESKYGPPC
PPCPAPPVA()GPSVFLFPPKPKDTLMISRTPEVTCVVVDVKQEDPEVQF
NWYVDGVEVHNAKTKPREEEFNSTYRVVSVLTVLHQDWLNGKEYKCKVSN
KGLPSSIEKTISKAKGQPREPQVYTLPPSQEEMTKNQVSLTCDVSGFYPS
DIAVEWESDGQPENNYKTTPPVLDSDGSFFLYSRLTVDKSRWEEGDVFSC
SVMHEALHNHYTQKSLSLSPG;

and the anti-TIGIT portion of the anti-PVRIG/anti-TIGIT bispecific antibody comprises an anti-TIGIT sequence selected from the group consisting of the following sequences:

CPA.9.086 scFv (VL-linker-VH) hIgG4 Variant 1
(SEQ ID NO: 3417)
QSALTQPRSASGNPGQRVTISCSGSSSNMGRRPVNWYQQIPGTAPKLLIYSQNQRPSGVPDRFSGSQSGTSA
SLTISGLQSEDEAEYFCAVWDDIGRVLQLGGGTQLAVLggggsggggsggggsEVQLVETGGGLIQPGRSLR
LSCAASGFTFSSYAMHWVRQAPGKGLEWVAVISYAGEVKYYADSVKGRFTISRDNSKNTLYLQMNSLRAEDT
AVYYCARDPLPLHYYGMDVWGQGTTVTVSSESKYGPPCPPCPAPPVA()GPSVFLFPPKPKDTLMISRTPEV
TCVVVDVKQEDPEVQFNWYVDGVEVHNAKTKPREEQFNSTYRVVSVLTVLHQDWLNGKEYKCKVSNKGLPSS
IEKTISKAKGQPREPQVYTLPPSQEQMTKNQVKLTCLVKGFYPSDIAVEWESNGQPENNYKTTPPVLDSDGS
FFLYSRLTVDKSRWQEGNVFSCSVMHEALHNHYTQKSLSLSPG;
CPA.9.086 scFv (VH-linker-VL) hIgG4 Variant 1
(SEQ ID NO: 3427)
EVQLVETGGGLIQPGRSLRLSCAASGFTFSSYAMHWVRQAPGKGLEWVAVISYAGEVKYYADSVKGRFTISR
DNSKNTLYLQMNSLRAEDTAVYYCARDPLPLHYYGMDVWGQGTTVTVSSggggsggggsggggsQSALTQPR
SASGNPGQRVTISCSGSSSNMGRRPVNWYQQIPGTAPKLLIYSQNQRPSGVPDRFSGSQSGTSASLTISGLQ
SEDEAEYFCAVWDDIGRVLQLGGGTQLAVLESKYGPPCPPCPAPPVA()GPSVFLFPPKPKDTLMISRTPEV
TCVVVDVKQEDPEVQFNWYVDGVEVHNAKTKPREEQFNSTYRVVSVLTVLHQDWLNGKEYKCKVSNKGLPSS
IEKTISKAKGQPREPQVYTLPPSQEQMTKNQVKLTCLVKGFYPSDIAVEWESNGQPENNYKTTPPVLDSDGS
FFLYSRLTVDKSRWQEGNVFSCSVMHEALHNHYTQKSLSLSPG;
CPA.9.086 hIgG4 Variant 1
(SEQ ID NO: 3457)
EVQLVETGGGLIQPGRSLRLSCAASGFTFSSYAMHWVRQAPGKGLEWVAVISYAGEVKYYADSVKGRFTISR
DNSKNTLYLQMNSLRAEDTAVYYCARDPLPLHYYGMDVWGQGTTVTVSSASTKGPSVFPLAPCSRSTSESTA
ALGCLVKDYFPEPVTVSWNSGALTSGVHTFPAVLQSSGLYSLSSVVTVPSSSLGTKTYTCNVDHKPSDTKVD
KRVESKYGPPCPPCPAPPVA()GPSVFLFPPKPKDTLMISRTPEVTCVVVDVKQEDPEVQFNWYVDGVEVHN
AKTKPREEQFNSTYRVVSVLTVLHQDWLNGKEYKCKVSNKGLPSSIEKTISKAKGQPREPQVYTLPPSQEQM
TKNQVKLTCLVKGFYPSDIAVEWESNGQPENNYKTTPPVLDSDGSFFLYSRLTVDKSRWQEGNVFSCSVMHE
ALHNHYTQKSLSLSPG;
CHA.9.547.18 scFv (VL-linker-VH) hIgG4 Variant 1
(SEQ ID NO: 3517)
DIQMTQSPSSLSASVGDRITITCRASQSMAIWLSWYQQKPGKAPKLLIYKASKSHTGVPSRFSGSGSGTDFT
LTISSLQPEDFATYYCQQGQSYPYTFGQGTKLEIKggggsggggsggggsEVQLVESGGGLVQPGGSLRLSC
AASGFTFSSYIMSWVRQAPGKGLEWVATISGGSKGQYYADSVKGRFTISRDNSKNTLYLQMNSLRAEDTAVY
YCAKWLLSYYAMDYWGQGTLVTVSSESKYGPPCPPCPAPPVA()GPSVFLFPPKPKDTLMISRTPEVTCVVV
DVKQEDPEVQFNWYVDGVEVHNAKTKPREEQFNSTYRVVSVLTVLHQDWLNGKEYKCKVSNKGLPSSIEKTI
SKAKGQPREPQVYTLPPSQEQMTKNQVKLTCLVKGFYPSDIAVEWESNGQPENNYKTTPPVLDSDGSFFLYS
RLTVDKSRWQEGNVFSCSVMHEALHNHYTQKSLSLSPG;
CHA.9.547.18 scFv (VH-linker-VL) hIgG4 Variant 1
(SEQ ID NO: 3527)
EVQLVESGGGLVQPGGSLRLSCAASGFTFSSYIMSWVRQAPGKGLEWVATISGGSKGQYYADSVKGRFTISR
DNSKNTLYLQMNSLRAEDTAVYYCAKWLLSYYAMDYWGQGTLVTVSSggggsggggsggggsDIQMTQSPSS
LSASVGDRITITCRASQSMAIWLSWYQQKPGKAPKLLIYKASKSHTGVPSRFSGSGSGTDFTLTISSLQPED
FATYYCQQGQSYPYTFGQGTKLEIKESKYGPPCPPCPAPPVA()GPSVFLFPPKPKDTLMISRTPEVTCVVV
DVKQEDPEVQFNWYVDGVEVHNAKTKPREEQFNSTYRVVSVLTVLHQDWLNGKEYKCKVSNKGLPSSIEKTI
SKAKGQPREPQVYTLPPSQEQMTKNQVKLTCLVKGFYPSDIAVEWESNGQPENNYKTTPPVLDSDGSFFLYS
RLTVDKSRWQEGNVFSCSVMHEALHNHYTQKSLSLSPG;
and
CHA.9.547.18 hIgG4 Variant 1
(SEQ ID NO: 3557)
EVQLVESGGGLVQPGGSLRLSCAASGFTFSSYIMSWVRQAPGKGLEWVATISGGSKGQYYADSVKGRFTISR
DNSKNTLYLQMNSLRAEDTAVYYCAKWLLSYYAMDYWGQGTLVTVSSASTKGPSVFPLAPCSRSTSESTAAL
GCLVKDYFPEPVTVSWNSGALTSGVHTFPAVLQSSGLYSLSSVVTVPSSSLGTKTYTCNVDHKPSNTKVDKR
VESKYGPPCPPCPAPPVA()GPSVFLFPPKPKDTLMISRTPEVTCVVVDVKQEDPEVQFNWYVDGVEVHNAK
TKPREEQFNSTYRVVSVLTVLHQDWLNGKEYKCKVSNKGLPSSIEKTISKAKGQPREPQVYTLPPSQEQMTK
NQVKLTCLVKGFYPSDIAVEWESNGQPENNYKTTPPVLDSDGSFFLYSRLTVDKSRWQEGNVFSCSVMHEAL
HNHYTQKSLSLSPG.

[0520] In some embodiments, the anti-PVRIG portion of the anti-PVRIG/anti-TIGIT bispecific antibody comprises the following anti-PVRIG sequence

CHA.7.518.4 hIgG4 Variant 1

(SEQ ID NO: 3357)

QVQLVQSGAEVKKPGASVKVSCKASGYTFTDYNINWVRQAPGQGLEWMGY
IYPYIGGSGYAQKFQGRVTMTRDTSTSTVYMELSSLRSEDTAVYYCARED
KTARNAMDYWGQGTLVTVSSASTKGPSVFPLAPCSRSTSESTAALGCLVK
DYFPEPVTVSWNSGALTSGVHTFPAVLQSSGLYSLSSVVTVPSSSLGTKT
YTCNVDHKPSNTKVDKRVESKYGPPCPPCPAPPVA()GPSVFLFPPKPKD
TLMISRTPEVTCVVVDVKQEDPEVQFNWYVDGVEVHNAKTKPREEQFNST
YRVVSVLTVLHQDWLNGKEYKCKVSNKGLPSSIEKTISKAKGQPREPQVY
TLPPSQEQMTKNQVKLTCLVKGFYPSDIAVEWESNGQPENNYKTTPPVLD
SDGSFFLYSRLTVDKSRWQEGNVFSCSVMHEALHNHYTQKSLSLSPG;

and the anti-TIGIT portion of the anti-PVRIG/anti-TIGIT bispecific antibody comprises an anti-TIGIT sequence selected from the group consisting of the following sequences:

CPA.9.086 scFv (VL-linker-VH) hIgG4 Variant 2
(SEQ ID NO: 3437)
QSALTQPRSASGNPGQRVTISCSGSSSNMGRRPVNWYQQIPGTAPKLLIYSQNQRPSGVPDRFSGSQSGTSA
SLTISGLQSEDEAEYFCAVWDDIGRVLQLGGGTQLAVLggggsggggsggggsEVQLVETGGGLIQPGRSLR
LSCAASGFTFSSYAMHWVRQAPGKGLEWVAVISYAGEVKYYADSVKGRFTISRDNSKNTLYLQMNSLRAEDT
AVYYCARDPLPLHYYGMDVWGQGTTVTVSSESKYGPPCPPCPAPPVA()GPSVFLFPPKPKDTLMISRTPEV
TCVVVDVKQEDPEVQFNWYVDGVEVHNAKTKPREEEFNSTYRVVSVLTVLHQDWLNGKEYKCKVSNKGLPSS
IEKTISKAKGQPREPQVYTLPPSQEEMTKNQVSLTCDVSGFYPSDIAVEWESDGQPENNYKTTPPVLDSDGS
FFLYSRLTVDKSRWEEGDVFSCSVMHEALHNHYTQKSLSLSPG;
CPA.9.086 scFv (VH-linker-VL) hIgG4 Variant 2
(SEQ ID NO: 3447)
EVQLVETGGGLIQPGRSLRLSCAASGFTFSSYAMHWVRQAPGKGLEWVAVISYAGEVKYYADSVKGRFTISR
DNSKNTLYLQMNSLRAEDTAVYYCARDPLPLHYYGMDVWGQGTTVTVSSggggsggggsggggsQSALTQPR
SASGNPGQRVTISCSGSSSNMGRRPVNWYQQIPGTAPKLLIYSQNQRPSGVPDRFSGSQSGTSASLTISGLQ
SEDEAEYFCAVWDDIGRVLQLGGGTQLAVLESKYGPPCPPCPAPPVA()GPSVFLFPPKPKDTLMISRTPEV
TCVVVDVKQEDPEVQFNWYVDGVEVHNAKTKPREEEFNSTYRVVSVLTVLHQDWLNGKEYKCKVSNKGLPSS
IEKTISKAKGQPREPQVYTLPPSQEEMTKNQVSLTCDVSGFYPSDIAVEWESDGQPENNYKTTPPVLDSDGS
FFLYSRLTVDKSRWEEGDVFSCSVMHEALHNHYTQKSLSLSPG;
CPA.9.086 hIgG4 Variant 2
(SEQ ID NO: 3467)
EVQLVETGGGLIQPGRSLRLSCAASGFTFSSYAMHWVRQAPGKGLEWVAVISYAGEVKYYADSVKGRFTISR
DNSKNTLYLQMNSLRAEDTAVYYCARDPLPLHYYGMDVWGQGTTVTVSSASTKGPSVFPLAPCSRSTSESTA
ALGCLVKDYFPEPVTVSWNSGALTSGVHTFPAVLQSSGLYSLSSVVTVPSSSLGTKTYTCNVDHKPSDTKVD
KRVESKYGPPCPPCPAPPVA()GPSVFLFPPKPKDTLMISRTPEVTCVVVDVKQEDPEVQFNWYVDGVEVHN
AKTKPREEEFNSTYRVVSVLTVLHQDWLNGKEYKCKVSNKGLPSSIEKTISKAKGQPREPQVYTLPPSQEEM
TKNQVSLTCDVSGFYPSDIAVEWESDGQPENNYKTTPPVLDSDGSFFLYSRLTVDKSRWEEGDVFSCSVMHE
ALHNHYTQKSLSLSPG;
CHA.9.547.18 scFv (VL-linker-VH) hIgG4 Variant 2
(SEQ ID NO: 3537)
DIQMTQSPSSLSASVGDRITITCRASQSMAIWLSWYQQKPGKAPKLLIYKASKSHTGVPSRFSGSGSGTDFT
LTISSLQPEDFATYYCQQGQSYPYTFGQGTKLEIKggggsggggsggggsEVQLVESGGGLVQPGGSLRLSC
AASGFTFSSYIMSWVRQAPGKGLEWVATISGGSKGQYYADSVKGRFTISRDNSKNTLYLQMNSLRAEDTAVY
YCAKWLLSYYAMDYWGQGTLVTVSSESKYGPPCPPCPAPPVA()GPSVFLFPPKPKDTLMISRTPEVTCVVV
DVKQEDPEVQFNWYVDGVEVHNAKTKPREEEFNSTYRVVSVLTVLHQDWLNGKEYKCKVSNKGLPSSIEKTI
SKAKGQPREPQVYTLPPSQEEMTKNQVSLTCDVSGFYPSDIAVEWESDGQPENNYKTTPPVLDSDGSFFLYS
RLTVDKSRWEEGDVFSCSVMHEALHNHYTQKSLSLSPG;
CHA.9.547.18 scFv (VH-linker-VL) hIgG4 Variant 2
(SEQ ID NO: 3547)
EVQLVESGGGLVQPGGSLRLSCAASGFTFSSYIMSWVRQAPGKGLEWVATISGGSKGQYYADSVKGRFTISR
DNSKNTLYLQMNSLRAEDTAVYYCAKWLLSYYAMDYWGQGTLVTVSSggggsggggsggggsDIQMTQSPSS
LSASVGDRITITCRASQSMAIWLSWYQQKPGKAPKLLIYKASKSHTGVPSRFSGSGSGTDFTLTISSLQPED
FATYYCQQGQSYPYTFGQGTKLEIKESKYGPPCPPCPAPPVA()GPSVFLFPPKPKDTLMISRTPEVTCVVV
DVKQEDPEVQFNWYVDGVEVHNAKTKPREEEFNSTYRVVSVLTVLHQDWLNGKEYKCKVSNKGLPSSIEKTI
SKAKGQPREPQVYTLPPSQEEMTKNQVSLTCDVSGFYPSDIAVEWESDGQPENNYKTTPPVLDSDGSFFLYS
RLTVDKSRWEEGDVFSCSVMHEALHNHYTQKSLSLSPG;
and
CHA.9.547.18 hIgG4 Variant 2
(SEQ ID NO: 3567)
EVQLVESGGGLVQPGGSLRLSCAASGFTFSSYIMSWVRQAPGKGLEWVATISGGSKGQYYADSVKGRFTISR
DNSKNTLYLQMNSLRAEDTAVYYCAKWLLSYYAMDYWGQGTLVTVSSASTKGPSVFPLAPCSRSTSESTAAL
GCLVKDYFPEPVTVSWNSGALTSGVHTFPAVLQSSGLYSLSSVVTVPSSSLGTKTYTCNVDHKPSDTKVDKR
VESKYGPPCPPCPAPPVA()GPSVFLFPPKPKDTLMISRTPEVTCVVVDVKQEDPEVQFNWYVDGVEVHNAK
TKPREEEFNSTYRVVSVLTVLHQDWLNGKEYKCKVSNKGLPSSIEKTISKAKGQPREPQVYTLPPSQEEMTK
NQVSLTCDVSGFYPSDIAVEWESDGQPENNYKTTPPVLDSDGSFFLYSRLTVDKSRWEEGDVFSCSVMHEAL
HNHYTQKSLSLSPG.

[0521] In some embodiments, the anti-PVRIG portion of the anti-PVRIG/anti-TIGIT bispecific antibody comprises the following anti-PVRIG sequence

CHA.7.518.4 hIgG4 Variant 2

(SEQ ID NO: 3367)

QVQLVQSGAEVKKPGASVKVSCKASGYTFTDYNINWVRQAPGQGLEWMGY
IYPYIGGSGYAQKFQGRVTMTRDTSTSTVYMELSSLRSEDTAVYYCARED
KTARNAMDYWGQGTLVTVSSASTKGPSVFPLAPCSRSTSESTAALGCLVK
DYFPEPVTVSWNSGALTSGVHTFPAVLQSSGLYSLSSVVTVPSSSLGTKT
YTCNVDHKPSDTKVDKRVESKYGPPCPPCPAPPVA()GPSVFLFPPKPKD
TLMISRTPEVTCVVVDVKQEDPEVQFNWYVDGVEVHNAKTKPREEEFNST
YRVVSVLTVLHQDWLNGKEYKCKVSNKGLPSSIEKTISKAKGQPREPQVY
TLPPSQEEMTKNQVSLTCDVSGFYPSDIAVEWESDGQPENNYKTTPPVLD
SDGSFFLYSRLTVDKSRWEEGDVFSCSVMHEALHNHYTQKSLSLSPG;

and the anti-TIGIT portion of the anti-PVRIG/anti-TIGIT bispecific antibody comprises an anti-TIGIT sequence selected from the group consisting of the following sequences:

CPA.9.086 scFv (VL-linker-VH) hIgG4 Variant 1
(SEQ ID NO: 3417)
QSALTQPRSASGNPGQRVTISCSGSSSNMGRRPVNWYQQIPGTAPKLLIYSQNQRPSGVPDRFSGSQSGTSA
SLTISGLQSEDEAEYFCAVWDDIGRVLQLGGGTQLAVLggggsggggsggggsEVQLVETGGGLIQPGRSLR
LSCAASGFTFSSYAMHWVRQAPGKGLEWVAVISYAGEVKYYADSVKGRFTISRDNSKNTLYLQMNSLRAEDT
AVYYCARDPLPLHYYGMDVWGQGTTVTVSSESKYGPPCPPCPAPPVA()GPSVFLFPPKPKDTLMISRTPEV
TCVVVDVKQEDPEVQFNWYVDGVEVHNAKTKPREEQFNSTYRVVSVLTVLHQDWLNGKEYKCKVSNKGLPSS
IEKTISKAKGQPREPQVYTLPPSQEQMTKNQVKLTCLVKGFYPSDIAVEWESNGQPENNYKTTPPVLDSDGS
FFLYSRLTVDKSRWQEGNVFSCSVMHEALHNHYTQKSLSLSPG;
CPA.9.086 scFv (VH-linker-VL) hIgG4 Variant 1
(SEQ ID NO: 3427)
EVQLVETGGGLIQPGRSLRLSCAASGFTFSSYAMHWVRQAPGKGLEWVAVISYAGEVKYYADSVKGRFTISR
DNSKNTLYLQMNSLRAEDTAVYYCARDPLPLHYYGMDVWGQGTTVTVSSggggsggggsggggsQSALTQPR
SASGNPGQRVTISCSGSSSNMGRRPVNWYQQIPGTAPKLLIYSQNQRPSGVPDRFSGSQSGTSASLTISGLQ
SEDEAEYFCAVWDDIGRVLQLGGGTQLAVLESKYGPPCPPCPAPPVA()GPSVFLFPPKPKDTLMISRTPEV
TCVVVDVKQEDPEVQFNWYVDGVEVHNAKTKPREEQFNSTYRVVSVLTVLHQDWLNGKEYKCKVSNKGLPSS
IEKTISKAKGQPREPQVYTLPPSQEQMTKNQVKLTCLVKGFYPSDIAVEWESNGQPENNYKTTPPVLDSDGS
FFLYSRLTVDKSRWQEGNVFSCSVMHEALHNHYTQKSLSLSPG;
CPA.9.086 hIgG4 Variant 1
(SEQ ID NO: 3457)
EVQLVETGGGLIQPGRSLRLSCAASGFTFSSYAMHWVRQAPGKGLEWVAVISYAGEVKYYADSVKGRFTISR
DNSKNTLYLQMNSLRAEDTAVYYCARDPLPLHYYGMDVWGQGTTVTVSSASTKGPSVFPLAPCSRSTSESTA
ALGCLVKDYFPEPVTVSWNSGALTSGVHTFPAVLQSSGLYSLSSVVTVPSSSLGTKTYTCNVDHKPSDTKVD
KRVESKYGPPCPPCPAPPVA()GPSVFLFPPKPKDTLMISRTPEVTCVVVDVKQEDPEVQFNWYVDGVEVHN
AKTKPREEQFNSTYRVVSVLTVLHQDWLNGKEYKCKVSNKGLPSSIEKTISKAKGQPREPQVYTLPPSQEQM
TKNQVKLTCLVKGFYPSDIAVEWESNGQPENNYKTTPPVLDSDGSFFLYSRLTVDKSRWQEGNVFSCSVMHE
ALHNHYTQKSLSLSPG;
CHA.9.547.18 scFv (VL-linker-VH) hIgG4 Variant 1
(SEQ ID NO: 3517)
DIQMTQSPSSLSASVGDRITITCRASQSMAIWLSWYQQKPGKAPKLLIYKASKSHTGVPSRFSGSGSGTDFT
LTISSLQPEDFATYYCQQGQSYPYTFGQGTKLEIKggggsggggsggggsEVQLVESGGGLVQPGGSLRLSC
AASGFTFSSYIMSWVRQAPGKGLEWVATISGGSKGQYYADSVKGRFTISRDNSKNTLYLQMNSLRAEDTAVY
YCAKWLLSYYAMDYWGQGTLVTVSSESKYGPPCPPCPAPPVA()GPSVFLFPPKPKDTLMISRTPEVTCVVV
DVKQEDPEVQFNWYVDGVEVHNAKTKPREEQFNSTYRVVSVLTVLHQDWLNGKEYKCKVSNKGLPSSIEKTI
SKAKGQPREPQVYTLPPSQEQMTKNQVKLTCLVKGFYPSDIAVEWESNGQPENNYKTTPPVLDSDGSFFLYS
RLTVDKSRWQEGNVFSCSVMHEALHNHYTQKSLSLSPG;
CHA.9.547.18 scFv (VH-linker-VL) hIgG4 Variant 1
(SEQ ID NO: 3527)
EVQLVESGGGLVQPGGSLRLSCAASGFTFSSYIMSWVRQAPGKGLEWVATISGGSKGQYYADSVKGRFTISR
DNSKNTLYLQMNSLRAEDTAVYYCAKWLLSYYAMDYWGQGTLVTVSSggggsggggsggggsDIQMTQSPSS
LSASVGDRITITCRASQSMAIWLSWYQQKPGKAPKLLIYKASKSHTGVPSRFSGSGSGTDFTLTISSLQPED
FATYYCQQGQSYPYTFGQGTKLEIKESKYGPPCPPCPAPPVA()GPSVFLFPPKPKDTLMISRTPEVTCVVV
DVKQEDPEVQFNWYVDGVEVHNAKTKPREEQFNSTYRVVSVLTVLHQDWLNGKEYKCKVSNKGLPSSIEKTI
SKAKGQPREPQVYTLPPSQEQMTKNQVKLTCLVKGFYPSDIAVEWESNGQPENNYKTTPPVLDSDGSFFLYS
RLTVDKSRWQEGNVFSCSVMHEALHNHYTQKSLSLSPG;
and
CHA.9.547.18 hIgG4 Variant 1
(SEQ ID NO: 3557)

EVQLVESGGGLVQPGGSLRLSCAASGFTFSSYIMSWVRQAPGKGLEWVATISGGSKGQYYADSVKGRFTISR
DNSKNTLYLQMNSLRAEDTAVYYCAKWLLSYYAMDYWGQGTLVTVSSASTKGPSVFPLAPCSRSTSESTAAL
GCLVKDYFPEPVTVSWNSGALTSGVHTFPAVLQSSGLYSLSSVVTVPSSSLGTKTYTCNVDHKPSNTKVDKR
VESKYGPPCPPCPAPPVA()GPSVFLFPPKPKDTLMISRTPEVTCVVVDVKQEDPEVQFNWYVDGVEVHNAK
TKPREEQFNSTYRVVSVLTVLHQDWLNGKEYKCKVSNKGLPSSIEKTISKAKGQPREPQVYTLPPSQEQMTK
NQVKLTCLVKGFYPSDIAVEWESNGQPENNYKTTPPVLDSDGSFFLYSRLTVDKSRWQEGNVFSCSVMHEAL
HNHYTQKSLSLSPG.

[0522] In some embodiments, the anti-PVRIG portion of the anti-PVRIG/anti-TIGIT bispecific antibody comprises the following anti-PVRIG sequence

CHA.7.518.4 VH Clambda-VL-CH1 Crossmab hIgG4
Fc Y349C E356D L358L T366S L368A Y407V Hole

(SEQ ID NO: 3661)

QVQLVQSGAEVKKPGASVKVSCKASGYTFTDYNINWVRQAPGQGLEWMGY
IYPYIGGSGYAQKFQGRVTMTRDTSTSTVYMELSSLRSEDTAVYYCARED
KTARNAMDYWGQGTLVTVSSASVAAPSVFIFPPSDEQLKSGTASVVCLLN
NFYPREAKVQWKVDNALQSGNSQESVTEQDSKDSTYSLSSTLTLSKADYE
KHKVYACEVTHQGLSSPVTKSFNRGECESKYGPPCPPCPAPEFLGGPSVF
LFPPKPKDTLMISRTPEVTCVVVDVSQEDPEVQFNWYVDGVEVHNAKTKP
REEQFNSTYRVVSVLTVLHQDWLNGKEYKCKVSNKGLPSSIEKTISKAKG
QPREPQVCTLPPSQDELTKNQVSLSCAVKGFYPSDIAVEWESNGQPENNY
KTTPPVLDSDGSFFLVSRLTVDKSRWQEGNVFSCSVMHEALHNHYTQKSL
SLSPG;

and the anti-TIGIT portion of the anti-PVRIG/anti-TIGIT bispecific antibody comprises an anti-TIGIT sequence selected from the group consisting of the following sequences:

CPA.9.086 VH Clambda-VL-CH1 Crossmab hIgG4 Fc Y354C E356D M348L T366W
Knob
(SEQ ID NO: 3487)
EVQLVETGGGLIQPGRSLRLSCAASGFTFSSYAMHWVRQAPGKGLEWVAVISYAGEVKYYADSVKGRFTISR
DNSKNTLYLQMNSLRAEDTAVYYCARDPLPLHYYGMDVWGQGTTVTVSSASGQPKAAPSVTLFPPSSEELQA
NKATLVCLISDFYPGAVTVAWKADSSPVKAGVETTTPSKQSNNKYAASSYLSLTPEQWKSHRSYSCQVTHEG
STVEKTVAPTECSESKYGPPCPPCPAPEFLGGPSVFLFPPKPKDTLMISRTPEVTCVVVDVSQEDPEVQFNW
YVDGVEVHNAKTKPREEQFNSTYRVVSVLTVLHQDWLNGKEYKCKVSNKGLPSSIEKTISKAKGQPREPQVY
TLPPCQDELTKNQVSLWCLVKGFYPSDIAVEWESNGQPENNYKTTPPVLDSDGSFFLYSRLTVDKSRWQEGN
VFSCSVMHEALHNHYTQKSLSLSPG;
CPA.9.086 VH hIgG4 Fc Y354C E356D M348L T366W Knob
(SEQ ID NO: 3507)
EVQLVETGGGLIQPGRSLRLSCAASGFTFSSYAMHWVRQAPGKGLEWVAVISYAGEVKYYADSVKGRFTISR
DNSKNTLYLQMNSLRAEDTAVYYCARDPLPLHYYGMDVWGQGTTVTVSSASASTKGPSVFPLAPCSRSTSES
TAALGCLVKDYFPEPVTVSWNSGALTSGVHTFPAVLQSSGLYSLSSVVTVPSSSLGTKTYTCNVDHKPSNTK
VDKRVESKYGPPCPPCPAPEFLGGPSVFLFPPKPKDTLMISRTPEVTCVVVDVSQEDPEVQFNWYVDGVEVH
NAKTKPREEQFNSTYRVVSVLTVLHQDWLNGKEYKCKVSNKGLPSSIEKTISKAKGQPREPQVYTLPPCQDE
LTKNQVSLWCLVKGFYPSDIAVEWESNGQPENNYKTTPPVLDSDGSFFLYSRLTVDKSRWQEGNVFSCSVMH
EALHNHYTQKSLSLSPG;
CHA.9.547.18 VH Clambda-VL-CH1 Crossmab hIgG4 Fc Y354C E356D M348L
T366W Knob
(SEQ ID NO: 3662)
EVQLVESGGGLVQPGGSLRLSCAASGFTFSSYIMSWVRQAPGKGLEWVATISGGSKGQYYADSVKGRFTISR
DNSKNTLYLQMNSLRAEDTAVYYCAKWLLSYYAMDYWGQGTLVTVSSASVAAPSVFIFPPSDEQLKSGTASV
VCLLNNFYPREAKVQWKVDNALQSGNSQESVTEQDSKDSTYSLSSTLTLSKADYEKHKVYACEVTHQGLSSP
VTKSFNRGECESKYGPPCPPCPAPEFLGGPSVFLFPPKPKDTLMISRTPEVTCVVVDVSQEDPEVQFNWYVD
GVEVHNAKTKPREEQFNSTYRVVSVLTVLHQDWLNGKEYKCKVSNKGLPSSIEKTISKAKGQPREPQVYTLP
PCQDELTKNQVSLWCLVKGFYPSDIAVEWESNGQPENNYKTTPPVLDSDGSFFLYSRLTVDKSRWQEGNVFS
CSVMHEALHNHYTQKSLSLSPG;
and
CHA.9.547.18 VH hIgG4 Fc Y354C E356D M348L T366W Knob
(SEQ ID NO: 3607)
EVQLVESGGGLVQPGGSLRLSCAASGFTFSSYIMSWVRQAPGKGLEWVATISGGSKGQYYADSVKGRFTISR
DNSKNTLYLQMNSLRAEDTAVYYCAKWLLSYYAMDYWGQGTLVTVSSASASTKGPSVFPLAPCSRSTSESTA
ALGCLVKDYFPEPVTVSWNSGALTSGVHTFPAVLQSSGLYSLSSVVTVPSSSLGTKTYTCNVDHKPSNTKVD
KRVESKYGPPCPPCPAPEFLGGPSVFLFPPKPKDTLMISRTPEVTCVVVDVSQEDPEVQFNWYVDGVEVHNA
KTKPREEQFNSTYRVVSVLTVLHQDWLNGKEYKCKVSNKGLPSSIEKTISKAKGQPREPQVYTLPPCQDELT
KNQVSLWCLVKGFYPSDIAVEWESNGQPENNYKTTPPVLDSDGSFFLYSRLTVDKSRWQEGNVFSCSVMHEA
LHNHYTQKSLSLSPG.

[0523] In some embodiments, the anti-PVRIG portion of the anti-PVRIG/anti-TIGIT bispecific antibody comprises the following anti-PVRIG sequence

CHA.7.518.4 VH Clambda-VL-CH1 Crossmab hIgG4
Fc Y354C E356D M348L T366W Knob

(SEQ ID NO: 3663)

QVQLVQSGAEVKKPGASVKVSCKASGYTFTDYNINWVRQAPGQGLEWMGY
IYPYIGGSGYAQKFQGRVTMTRDTSTSTVYMELSSLRSEDTAVYYCARED
KTARNAMDYWGQGTLVTVSSASVAAPSVFIFPPSDEQLKSGTASVVCLLN
NFYPREAKVQWKVDNALQSGNSQESVTEQDSKDSTYSLSSTLTLSKADYE
KHKVYACEVTHQGLSSPVTKSFNRGECESKYGPPCPPCPAPEFLGGPSVF
LFPPKPKDTLMISRTPEVTCVVVDVSQEDPEVQFNWYVDGVEVHNAKTKP
REEQFNSTYRVVSVLTVLHQDWLNGKEYKCKVSNKGLPSSIEKTISKAKG
QPREPQVYTLPPCQDELTKNQVSLWCLVKGFYPSDIAVEWESNGQPENNY
KTTPPVLDSDGSFFLYSRLTVDKSRWQEGNVFSCSVMHEALHNHYTQKSL
SLSPG;

and the anti-TIGIT portion of the anti-PVRIG/anti-TIGIT bispecific antibody comprises an anti-TIGIT sequence selected from the group consisting of the following sequences:

CPA.9.086 VH Clambda-VL-CH1 Crossmab hIgG4 Fc Y349C E356D L358L T366S
L368A Y407V Hole
(SEQ ID NO: 3477)
EVQLVETGGGLIQPGRSLRLSCAASGFTFSSYAMHWVRQAPGKGLEWVAVISYAGEVKYYADSVKGRFTISR
DNSKNTLYLQMNSLRAEDTAVYYCARDPLPLHYYGMDVWGQGTTVTVSSASGQPKAAPSVTLFPPSSEELQA
NKATLVCLISDFYPGAVTVAWKADSSPVKAGVETTTPSKQSNNKYAASSYLSLTPEQWKSHRSYSCQVTHEG
STVEKTVAPTECSESKYGPPCPPCPAPEFLGGPSVFLFPPKPKDTLMISRTPEVTCVVVDVSQEDPEVQFNW
YVDGVEVHNAKTKPREEQFNSTYRVVSVLTVLHQDWLNGKEYKCKVSNKGLPSSIEKTISKAKGQPREPQVC
TLPPSQDELTKNQVSLSCAVKGFYPSDIAVEWESNGQPENNYKTTPPVLDSDGSFFLVSRLTVDKSRWQEGN
VFSCSVMHEALHNHYTQKSLSLSPG;
CPA.9.086 VH hIgG4 Fc Y349C E356D L358L T366S L368A Y407V Hole
(SEQ ID NO: 3497)
EVQLVETGGGLIQPGRSLRLSCAASGFTFSSYAMHWVRQAPGKGLEWVAVISYAGEVKYYADSVKGRFTISR
DNSKNTLYLQMNSLRAEDTAVYYCARDPLPLHYYGMDVWGQGTTVTVSSASASTKGPSVFPLAPCSRSTSES
TAALGCLVKDYFPEPVTVSWNSGALTSGVHTFPAVLQSSGLYSLSSVVTVPSSSLGTKTYTCNVDHKPSNTK
VDKRVESKYGPPCPPCPAPEFLGGPSVFLFPPKPKDTLMISRTPEVTCVVVDVSQEDPEVQFNWYVDGVEVH
NAKTKPREEQFNSTYRVVSVLTVLHQDWLNGKEYKCKVSNKGLPSSIEKTISKAKGQPREPQVCTLPPSQDE
LTKNQVSLSCAVKGFYPSDIAVEWESNGQPENNYKTTPPVLDSDGSFFLVSRLTVDKSRWQEGNVFSCSVMH
EALHNHYTQKSLSLSPG;
CHA.9.547.18 VH Clambda-VL-CH1 Crossmab hIgG4 Fc Y349C E356D L358L
T366S L368A Y407V Hole
(SEQ ID NO: 3664)
EVQLVESGGGLVQPGGSLRLSCAASGFTFSSYIMSWVRQAPGKGLEWVATISGGSKGQYYADSVKGRFTISR
DNSKNTLYLQMNSLRAEDTAVYYCAKWLLSYYAMDYWGQGTLVTVSSASVAAPSVFIFPPSDEQLKSGTASV
VCLLNNFYPREAKVQWKVDNALQSGNSQESVTEQDSKDSTYSLSSTLTLSKADYEKHKVYACEVTHQGLSSP
VTKSFNRGECESKYGPPCPPCPAPEFLGGPSVFLFPPKPKDTLMISRTPEVTCVVVDVSQEDPEVQFNWYVD
GVEVHNAKTKPREEQFNSTYRVVSVLTVLHQDWLNGKEYKCKVSNKGLPSSIEKTISKAKGQPREPQVCTLP
PSQDELTKNQVSLSCAVKGFYPSDIAVEWESNGQPENNYKTTPPVLDSDGSFFLVSRLTVDKSRWQEGNVFS
CSVMHEALHNHYTQKSLSLSPG;
and
CHA.9.547.18 VH hIgG4 Fc Y349C E356D L358L T366S L368A Y407V Hole
(SEQ ID NO: 3597)
EVQLVESGGGLVQPGGSLRLSCAASGFTFSSYIMSWVRQAPGKGLEWVATISGGSKGQYYADSVKGRFTISR
DNSKNTLYLQMNSLRAEDTAVYYCAKWLLSYYAMDYWGQGTLVTVSSASASTKGPSVFPLAPCSRSTSESTA
ALGCLVKDYFPEPVTVSWNSGALTSGVHTFPAVLQSSGLYSLSSVVTVPSSSLGTKTYTCNVDHKPSNTKVD
KRVESKYGPPCPPCPAPEFLGGPSVFLFPPKPKDTLMISRTPEVTCVVVDVSQEDPEVQFNWYVDGVEVHNA
KTKPREEQFNSTYRVVSVLTVLHQDWLNGKEYKCKVSNKGLPSSIEKTISKAKGQPREPQVCTLPPSQDELT
KNQVSLSCAVKGFYPSDIAVEWESNGQPENNYKTTPPVLDSDGSFFLVSRLTVDKSRWQEGNVFSCSVMHEA
LHNHYTQKSLSLSPG.

[0524] In some embodiments, the anti-PVRIG portion of the anti-PVRIG/anti-TIGIT bispecific antibody comprises the following anti-PVRIG sequence

CHA.7.518.4 VH hIgG4 Fc Y349C E356D L358L T366S
L368A Y407V Hole
(SEQ ID NO: 3397)
QVQLVQSGAEVKKPGASVKVSCKASGYTFTDYNINWVRQAPGQGLEWMGY
IYPYIGGSGYAQKFQGRVTMTRDTSTSTVYMELSSLRSEDTAVYYCARED
KTARNAMDYWGQGTLVTVSSASASTKGPSVFPLAPCSRSTSESTAALGCL
VKDYFPEPVTVSWNSGALTSGVHTFPAVLQSSGLYSLSSVVTVPSSSLGT
KTYTCNVDHKPSNTKVDKRVESKYGPPCPPCPAPEFLGGPSVFLFPPKPK
DTLMISRTPEVTCVVVDVSQEDPEVQFNWYVDGVEVHNAKTKPREEQFNS
TYRVVSVLTVLHQDWLNGKEYKCKVSNKGLPSSIEKTISKAKGQPREPQV
CTLPPSQDELTKNQVSLSCAVKGFYPSDIAVEWESNGQPENNYKTTPPVL
DSDGSFFLVSRLTVDKSRWQEGNVFSCSVMHEALHNHYTQKSLSLSPG;

and the anti-TIGIT portion of the anti-PVRIG/anti-TIGIT bispecific antibody comprises an anti-TIGIT sequence selected from the group consisting of the following sequences:

CPA.9.086 VH Clambda-VL-CH1 Crossmab hIgG4 Fc Y354C E356D M348L T366W
Knob
(SEQ ID NO: 3487)
EVQLVETGGGLIQPGRSLRLSCAASGFTFSSYAMHWVRQAPGKGLEWVAVISYAGEVKYYADSVKGRFTISR
DNSKNTLYLQMNSLRAEDTAVYYCARDPLPLHYYGMDVWGQGTTVTVSSASGQPKAAPSVTLFPPSSEELQA
NKATLVCLISDFYPGAVTVAWKADSSPVKAGVETTTPSKQSNNKYAASSYLSLTPEQWKSHRSYSCQVTHEG
STVEKTVAPTECSESKYGPPCPPCPAPEFLGGPSVFLFPPKPKDTLMISRTPEVTCVVVDVSQEDPEVQFNW
YVDGVEVHNAKTKPREEQFNSTYRVVSVLTVLHQDWLNGKEYKCKVSNKGLPSSIEKTISKAKGQPREPQVY
TLPPCQDELTKNQVSLWCLVKGFYPSDIAVEWESNGQPENNYKTTPPVLDSDGSFFLYSRLTVDKSRWQEGN
VFSCSVMHEALHNHYTQKSLSLSPG;
CPA.9.086 VH hIgG4 Fc Y354C E356D M348L T366W Knob
(SEQ ID NO: 3507)
EVQLVETGGGLIQPGRSLRLSCAASGFTFSSYAMHWVRQAPGKGLEWVAVISYAGEVKYYADSVKGRFTISR
DNSKNTLYLQMNSLRAEDTAVYYCARDPLPLHYYGMDVWGQGTTVTVSSASASTKGPSVFPLAPCSRSTSES
TAALGCLVKDYFPEPVTVSWNSGALTSGVHTFPAVLQSSGLYSLSSVVTVPSSSLGTKTYTCNVDHKPSNTK
VDKRVESKYGPPCPPCPAPEFLGGPSVFLFPPKPKDTLMISRTPEVTCVVVDVSQEDPEVQFNWYVDGVEVH
NAKTKPREEQFNSTYRVVSVLTVLHQDWLNGKEYKCKVSNKGLPSSIEKTISKAKGQPREPQVYTLPPCQDE
LTKNQVSLWCLVKGFYPSDIAVEWESNGQPENNYKTTPPVLDSDGSFFLYSRLTVDKSRWQEGNVFSCSVMH
EALHNHYTQKSLSLSPG;
CHA.9.547.18 VH Clambda-VL-CH1 Crossmab hIgG4 Fc Y354C E356D M348L
T366W Knob
(SEQ ID NO: 3665)
EVQLVESGGGLVQPGGSLRLSCAASGFTFSSYIMSWVRQAPGKGLEWVATISGGSKGQYYADSVKGRFTISR
DNSKNTLYLQMNSLRAEDTAVYYCAKWLLSYYAMDYWGQGTLVTVSSASVAAPSVFIFPPSDEQLKSGTASV
VCLLNNFYPREAKVQWKVDNALQSGNSQESVTEQDSKDSTYSLSSTLTLSKADYEKHKVYACEVTHQGLSSP
VTKSFNRGECESKYGPPCPPCPAPEFLGGPSVFLFPPKPKDTLMISRTPEVTCVVVDVSQEDPEVQFNWYVD
GVEVHNAKTKPREEQFNSTYRVVSVLTVLHQDWLNGKEYKCKVSNKGLPSSIEKTISKAKGQPREPQVYTLP
PCQDELTKNQVSLWCLVKGFYPSDIAVEWESNGQPENNYKTTPPVLDSDGSFFLYSRLTVDKSRWQEGNVFS
CSVMHEALHNHYTQKSLSLSPG;
and
CHA.9.547.18 VH hIgG4 Fc Y354C E356D M348L T366W Knob
(SEQ ID NO: 3607)
EVQLVESGGGLVQPGGSLRLSCAASGFTFSSYIMSWVRQAPGKGLEWVATISGGSKGQYYADSVKGRFTISR
DNSKNTLYLQMNSLRAEDTAVYYCAKWLLSYYAMDYWGQGTLVTVSSASASTKGPSVFPLAPCSRSTSESTA
ALGCLVKDYFPEPVTVSWNSGALTSGVHTFPAVLQSSGLYSLSSVVTVPSSSLGTKTYTCNVDHKPSNTKVD
KRVESKYGPPCPPCPAPEFLGGPSVFLFPPKPKDTLMISRTPEVTCVVVDVSQEDPEVQFNWYVDGVEVHNA
KTKPREEQFNSTYRVVSVLTVLHQDWLNGKEYKCKVSNKGLPSSIEKTISKAKGQPREPQVYTLPPCQDELT
KNQVSLWCLVKGFYPSDIAVEWESNGQPENNYKTTPPVLDSDGSFFLYSRLTVDKSRWQEGNVFSCSVMHEA
LHNHYTQKSLSLSPG.

[0525] In some embodiments, the anti-PVRIG portion of the anti-PVRIG/anti-TIGIT bispecific antibody comprises the following anti-PVRIG sequence

CHA.7.518.4 VH hIgG4 Fc Y354C E356D M348L T366W
Knob

(SEQ ID NO: 3407)

QVQLVQSGAEVKKPGASVKVSCKASGYTFTDYNINWVRQAPGQGLEWMGY
IYPYIGGSGYAQKFQGRVTMTRDTSTSTVYMELSSLRSEDTAVYYCARED
KTARNAMDYWGQGTLVTVSSASASTKGPSVFPLAPCSRSTSESTAALGCL
VKDYFPEPVTVSWNSGALTSGVHTFPAVLQSSGLYSLSSVVTVPSSSLGT
KTYTCNVDHKPSNTKVDKRVESKYGPPCPPCPAPEFLGGPSVFLFPPKPK
DTLMISRTPEVTCVVVDVSQEDPEVQFNWYVDGVEVHNAKTKPREEQFNS
TYRVVSVLTVLHQDWLNGKEYKCKVSNKGLPSSIEKTISKAKGQPREPQV
YTLPPCQDELTKNQVSLWCLVKGFYPSDIAVEWESNGQPENNYKTTPPVL
DSDGSFFLYSRLTVDKSRWQEGNVFSCSVMHEALHNHYTQKSLSLSPG;

and the anti-TIGIT portion of the anti-PVRIG/anti-TIGIT bispecific antibody comprises an anti-TIGIT sequence selected from the group consisting of the following sequences:

CPA.9.086 VH Clambda-VL-CH1 Crossmab hIgG4 Fc Y349C E356D L358L T366S
L368A Y407V Hole
(SEQ ID NO: 3477)
EVQLVETGGGLIQPGRSLRLSCAASGFTFSSYAMHWVRQAPGKGLEWVAVISYAGEVKYYADSVKGRFTISR
DNSKNTLYLQMNSLRAEDTAVYYCARDPLPLHYYGMDVWGQGTTVTVSSASGQPKAAPSVTLFPPSSEELQA
NKATLVCLISDFYPGAVTVAWKADSSPVKAGVETTTPSKQSNNKYAASSYLSLTPEQWKSHRSYSCQVTHEG
STVEKTVAPTECSESKYGPPCPPCPAPEFLGGPSVFLFPPKPKDTLMISRTPEVTCVVVDVSQEDPEVQFNW
YVDGVEVHNAKTKPREEQFNSTYRVVSVLTVLHQDWLNGKEYKCKVSNKGLPSSIEKTISKAKGQPREPQVC
TLPPSQDELTKNQVSLSCAVKGFYPSDIAVEWESNGQPENNYKTTPPVLDSDGSFFLVSRLTVDKSRWQEGN
VFSCSVMHEALHNHYTQKSLSLSPG;
CPA.9.086 VH hIgG4 Fc Y349C E356D L358L T366S L368A Y407V Hole
(SEQ ID NO: 3497)
EVQLVETGGGLIQPGRSLRLSCAASGFTFSSYAMHWVRQAPGKGLEWVAVISYAGEVKYYADSVKGRFTISR
DNSKNTLYLQMNSLRAEDTAVYYCARDPLPLHYYGMDVWGQGTTVTVSSASASTKGPSVFPLAPCSRSTSES
TAALGCLVKDYFPEPVTVSWNSGALTSGVHTFPAVLQSSGLYSLSSVVTVPSSSLGTKTYTCNVDHKPSNTK
VDKRVESKYGPPCPPCPAPEFLGGPSVFLFPPKPKDTLMISRTPEVTCVVVDVSQEDPEVQFNWYVDGVEVH
NAKTKPREEQFNSTYRVVSVLTVLHQDWLNGKEYKCKVSNKGLPSSIEKTISKAKGQPREPQVCTLPPSQDE
LTKNQVSLSCAVKGFYPSDIAVEWESNGQPENNYKTTPPVLDSDGSFFLVSRLTVDKSRWQEGNVFSCSVMH
EALHNHYTQKSLSLSPG;
CHA.9.547.18 VH Clambda-VL-CH1 Crossmab hIgG4 Fc Y349C E356D L358L
T366S L368A Y407V Hole
(SEQ ID NO: 3666)
EVQLVESGGGLVQPGGSLRLSCAASGFTFSSYIMSWVRQAPGKGLEWVATISGGSKGQYYADSVKGRFTISR
DNSKNTLYLQMNSLRAEDTAVYYCAKWLLSYYAMDYWGQGTLVTVSSASVAAPSVFIFPPSDEQLKSGTASV
VCLLNNFYPREAKVQWKVDNALQSGNSQESVTEQDSKDSTYSLSSTLTLSKADYEKHKVYACEVTHQGLSSP
VTKSFNRGECESKYGPPCPPCPAPEFLGGPSVFLFPPKPKDTLMISRTPEVTCVVVDVSQEDPEVQFNWYVD
GVEVHNAKTKPREEQFNSTYRVVSVLTVLHQDWLNGKEYKCKVSNKGLPSSIEKTISKAKGQPREPQVCTLP
PSQDELTKNQVSLSCAVKGFYPSDIAVEWESNGQPENNYKTTPPVLDSDGSFFLVSRLTVDKSRWQEGNVFS
CSVMHEALHNHYTQKSLSLSPG;
and
CHA.9.547.18 VH hIgG4 Fc Y349C E356D L358L T366S L368A Y407V Hole
(SEQ ID NO: 3597)
EVQLVESGGGLVQPGGSLRLSCAASGFTFSSYIMSWVRQAPGKGLEWVATISGGSKGQYYADSVKGRFTISR
DNSKNTLYLQMNSLRAEDTAVYYCAKWLLSYYAMDYWGQGTLVTVSSASASTKGPSVFPLAPCSRSTSESTA
ALGCLVKDYFPEPVTVSWNSGALTSGVHTFPAVLQSSGLYSLSSVVTVPSSSLGTKTYTCNVDHKPSNTKVD
KRVESKYGPPCPPCPAPEFLGGPSVFLFPPKPKDTLMISRTPEVTCVVVDVSQEDPEVQFNWYVDGVEVHNA
KTKPREEQFNSTYRVVSVLTVLHQDWLNGKEYKCKVSNKGLPSSIEKTISKAKGQPREPQVCTLPPSQDELT
KNQVSLSCAVKGFYPSDIAVEWESNGQPENNYKTTPPVLDSDGSFFLVSRLTVDKSRWQEGNVFSCSVMHEA
LHNHYTQKSLSLSPG.

[0526] Additionally included in the definition of anti-PVRIG/anti-TIGIT bispecific antibodies are antibodies that comprise TIGIT binding domains that share identity to the binding domains from the TIGIT antibodies enumerated herein. That is, in certain embodiments, an anti-PVRIG/anti-TIGIT bispecific antibody according to the invention comprises heavy and light chain variable regions comprising amino acid sequences that are identical to all or part of the binding domains from the anti-TIGIT amino acid sequences of preferred anti-TIGIT antibodies, respectively, wherein the antibodies retain the desired functional properties of the parent anti-TIGIT antibodies. The percent identity between the two sequences is a function of the number of identical positions shared by the sequences (i.e., % homology=# of identical positions/total # of positions X 100), taking into account the number of gaps, and the length of each gap, which need to be introduced for optimal alignment of the two sequences. The comparison of sequences and determination of percent identity between two sequences can be accomplished using a mathematical algorithm, as described in the non-limiting examples below.

[0527] The percent identity between two amino acid sequences can be determined using the algorithm of E. Meyers and W. Miller (Comput. Appl. Biosci., 4:11-17 (1988)) which has been incorporated into the ALIGN program (version 2.0), using a PAM120 weight residue table, a gap length penalty of 12 and a gap penalty of 4. In addition, the percent identity between two amino acid sequences can be determined using the Needleman and Wunsch (J. Mol. Biol. 48:444-453 (1970)) algorithm which has been incorporated into the GAP program in the GCG software package (available commercially), using either a Blossum 62 matrix or a PAM250 matrix, and a gap weight of 16, 14, 12, 10, 8, 6, or 4 and a length weight of 1, 2, 3, 4, 5, or 6.

[0528] Additionally or alternatively, the protein sequences of the present invention can further be used as a “query sequence” to perform a search against public databases to, for example, identify related sequences. Such searches can be performed using the XBLAST program (version 2.0) of Altschul, et al. (1990) J Mol. Biol. 215:403-10. BLAST protein searches can be performed with the XBLAST program, score=50, wordlength=3 to obtain amino acid sequences homologous to the antibody molecules according to at least some embodiments of the invention. To obtain gapped alignments for comparison purposes, Gapped BLAST can be utilized as described in Altschul et al., (1997) Nucleic Acids Res. 25(17):3389-3402. When utilizing BLAST and Gapped BLAST programs, the default parameters of the respective programs (e.g., XBLAST and NBLAST) can be used.

[0529] In general, the percentage identity for comparison between TIGIT binding domains or antigen binding domains is at least 75%, at least 80%, at least 90%, with at least about 95%, 96%, 97%, 98% or 99% percent identity being preferred. The percentage identity may be along the whole amino acid sequence, for example the entire heavy or light chain or along a portion of the chains. For example, included within the definition of the anti-PVRIG/anti-TIGIT bispecific antibodies of the invention are those whose TIGIT binding portion or antigen binding domains shares identity along the entire variable region (for example, where the identity is 95% or 98% identical along the variable regions), or along the entire constant region, or along just the Fc domain. In particular, the invention provides anti-PVRIG/anti-TIGIT bispecific antibodies that have TIGIT binding portions or antigen binding domains with at least 75%, at least 80%, at least 90%, with at least about 95%, 96%, 97%, 98%, or 99% percent identity being preferred, with the CPA.9.086 antibody. In particular, the invention provides anti-PVRIG/anti-TIGIT bispecific antibodies that have TIGIT binding portions or antigen binding domains with at least 75%, at least 80%, at least 90%, with at least about 95%, 96%, 97%, 98%, or 99% percent identity being preferred, with the CHA.9.547.18 antibody.

[0530] In addition, also included are sequences that may have the identical CDRs but changes in the framework portions of the variable domain (or entire heavy or light chain). For example, TIGIT antibodies include those with CDRs identical to those shown in FIG. 23A-23D but whose identity along the variable region can be lower, for example 95 or 98% percent identical. In particular, the invention provides anti-PVRIG/anti-TIGIT bispecific antibodies that have TIGIT binding portions or antigen binding domains with identical CDRs to CPA.9.086 but with framework regions that are 95% or 98% identical to CPA.9.086. In particular, the invention provides anti-PVRIG/anti-TIGIT bispecific antibodies that have TIGIT binding portions or antigen binding domains with identical CDRs to CHA.9.547.18but with framework regions that are 95% or 98% identical to CHA.9.547.18.

[0531] In addition, also included are sequences that may have the identical CDRs but changes in the framework portions of the variable domain (or entire heavy or light chain). For example, TIGIT antibodies include those with CDRs identical to those shown in FIG. 24A-24EE but whose identity along the variable region can be lower, for example 95 or 98% percent identical.

[0532] In some embodiments, the TIGIT binding portion is from an anti-TIGIT antibody as provided in US2016/0176963A1, (incorporated herein by reference in its entirety). In some embodiments, the TIGIT binding portion is from an anti-TIGIT antibody as provided in US20170281764 (incorporated herein by reference in its entirety). In some embodiments, the TIGIT binding portion is from an anti-TIGIT antibody as provided in WO2015009856 (incorporated herein by reference in its entirety). In some embodiments, the TIGIT binding portion is from an anti-TIGIT antibody as provided in U.S. Pat. No. 9,713,641 (incorporated herein by reference in its entirety). In some embodiments, the TIGIT binding portion is from an anti-TIGIT antibody as provided in WO2016028656 (incorporated herein by reference in its entirety).

[0533] 1. TIGIT Antibodies that Compete for Binding

[0534] The present invention provides not only the enumerated antibodies but additional antibodies that compete with the enumerated antibodies (the CPA numbers enumerated herein that specifically bind to TIGIT) to specifically bind to the TIGIT molecule. The TIGIT antibodies of the invention “bin” into different epitope bins. Among the 44 TIGIT antibodies in the epitope binning study, there are four communities, each having related pairwise blocking patterns, which separate into 12 total discrete bins outlined herein. There are twelve discrete bins outlined herein; 1) BM9-H4, CHA.9.525, CPA.9.081-H4, CHA.9.538, CHA.9.553, CPA.9.069-H4, CHA.9.543, CHA.9.556, CPA.9.077-H4 and CHA.9.561; 2) CHA.9.560 and CHA.9.528; 3) CHA.9.552, CHA.9.521, CHA.9.541, CHA.9.529, CHA.9.519, CHA.9.527 and CHA.9.549; 4) CPA.9.057-H4 and CHA.9.554; 5) CHA.9.546, CPA.9.012-H4, CHA.9.547, CPA.9.013-H4, CPA.9.018-H4, MBSA43-M1, Sino PVR-Fc(ligand), CHA.9.555, PVR-Fc M2A(ligand), BM29-H4, CPA.9.027-H4, CPA.9.049-H4 and CPA.9.053-H4; 6) CPA.9.064-H4; 7) BM26-H4; 8) CPA.9.059-H4; 9) CHA.9.535 and CPA.9.009-H4; 10) CHA.9.536, CHA.9.522 and CPA.9.015-H4; 11) CPA.9.011-H4 and BM8-H4 and 12) CPA.9.071-H4. As discussed in WO2018/033798, incorporated herein by reference in it's entirety.

[0535] Thus, the invention provides anti-PVRIG/anti-TIGIT bispecific antibodies that compete for binding with antibodies that are in discrete epitope bins 1 to 12. In a particular embodiment, the invention provides anti-PVRIG/anti-TIGIT bispecific antibodies that compete for binding with CPA.9.086 and are at least 95%, 96%, 97%, 98%, or 99% identical to CPA.9.086.

[0536] Additional antibodies anti-PVRIG/anti-TIGIT bispecific antibodies that compete with the enumerated antibodies are generated, as is known in the art and generally outlined below. Competitive binding studies can be done as is known in the art, generally using SPR/Biacore® binding assays, as well as ELISA and cell-based assays.

### VII. NUCLEIC ACIDS ENCODING ANTIBODIES

[0537] Nucleic acid compositions encoding the anti-PVRIG/anti-TIGIT bispecific antibodies of the invention are also provided, as well as expression vectors containing the nucleic acids and host cells transformed with the nucleic acid and/or expression vector compositions. As will be appreciated by those in the art, the protein sequences depicted herein can be encoded by any number of possible nucleic acid sequences, due to the degeneracy of the genetic code.

[0538] The nucleic acid compositions that encode the anti-PVRIG/anti-TIGIT bispecific antibodies will depend on the format of the antibody. For traditional, tetrameric antibodies containing two heavy chains and two light chains are encoded by two different nucleic acids, one encoding the heavy chain and one encoding the light chain. These can be put into a single expression vector or two expression vectors, as is known in the art, transformed into host cells, where they are expressed to form the antibodies of the invention. In some embodiments, for example when scFv constructs are used, a single nucleic acid encoding the variable heavy chain-linker-variable light chain is generally used, which can be inserted into an expression vector for transformation into host cells. The nucleic acids can be put into expression vectors that contain the appropriate transcriptional and translational control sequences, including, but not limited to, signal and secretion sequences, regulatory sequences, promoters, origins of replication, selection genes, etc.

[0539] Preferred mammalian host cells for expressing the recombinant anti-PVRIG/anti-TIGIT bispecific antibodies according to at least some embodiments of the invention include Chinese Hamster Ovary (CHO cells), PER.C6, HEK293 and others as is known in the art.

[0540] The nucleic acids may be present in whole cells, in a cell lysate, or in a partially purified or substantially pure form. A nucleic acid is “isolated” or “rendered substantially pure” when purified away from other cellular components or other contaminants, e.g., other cellular nucleic acids or proteins, by standard techniques, including alkaline/SDS treatment, CsCl banding, column chromatography, agarose gel electrophoresis and others well known in the art.

[0541] To create a scFv gene, the V_{H}- and V_{L}-encoding DNA fragments are operatively linked to another fragment encoding a flexible linker, e.g., encoding the amino acid sequence (Gly₄-Ser)₃ and others discussed herein, such that the V_{H} and V_{L} sequences can be expressed as a contiguous single-chain protein, with the V_{L} and V_{H} regions joined by the flexible linker.

### VIII. FORMULATIONS

[0542] The therapeutic compositions used in the practice of the foregoing methods (and in particular bispecific antibodies comprising at least the CDRs from CHA.7.518.1, CHA.7.518.4, CPA.9.086, and/or CHA.9.547.18) can be formulated into pharmaceutical compositions comprising a carrier suitable for the desired delivery method. Suitable carriers include any material that when combined with the therapeutic composition retains the anti-tumor function of the therapeutic composition and is generally non-reactive with the patient's immune system. Examples include, but are not limited to, any of a number of standard pharmaceutical carriers such as sterile phosphate buffered saline solutions, bacteriostatic water, and the like (see, generally, Remington's Pharmaceutical Sciences 16^{th} Edition, A. Osal., Ed., 1980). Acceptable carriers, excipients, or stabilizers are nontoxic to recipients at the dosages and concentrations employed and may include buffers.

[0543] In some embodiments, the anti-PVRIG/anti-TIGIT bispecific antibody formulated into a pharmaceutical composition comprises the following sequences:

CHA.7.518.1.H4(S241P) VH IgG1 CH1 IgG4 CH2—CH3
S354C, E356D, M358L, T366W

(SEQ ID NO: 3175)

QVQLVQSGAEVKKPGASVKVSCKASGYTFTDYNINWVRQAPGQGLEWMGY
IYPYIGGSGYAQKFQGRVTMTRDTSTSTVYMELSSLRSEDTAVYYCARED
KTARNAMDYWGQGTLVTVSSASTKGPSVFPLAPCSRSTSESTAALGCLVK
DYFPEPVTVSWNSGALTSGVHTFPAVLQSSGLYSLSSVVTVPSSSLGTKT
YTCNVDHKPSNTKVDKRVESKYGPPCPPCPAPEFLGGPSVFLFPPKPKDT
LMISRTPEVTCVVVDVSQEDPEVQFNWYVDGVEVHNAKTKPREEQFNSTY
RVVSVLTVLHQDWLNGKEYKCKVSNKGLPSSIEKTISKAKGQPREPQVYT
LPPCQDELTKNQVSLWCLVKGFYPSDIAVEWESNGQPENNYKTTPPVLDS
DGSFFLYSRLTVDKSRWQEGNVFSCSVMHEALHNHYTQKSLSLSPGK;
CHA.7.518.1.H4(S241P) VL Ckappa

(SEQ ID NO: 3176)

DIQMTQSPSSLSASVGDRVTITCRVSENIYSNLAWYQQKPGKAPKLLIYE
ATNLAEGVPSRFSGSGSGTDFTLTISSLQPEDFATYYCQHFWGTPYTFGQ
GTKLEIKRTVAAPSVFIFPPSDEQLKSGTASVVCLLNNFYPREAKVQWKV
DNALQSGNSQESVTEQDSKDSTYSLSSTLTLSKADYEKHKVYACEVTHQG
LSSPVTKSFNRGEC;
and
CPA.9.086 HC Clambda Crossmab IgG4 Y349C, E356D,
M358L, T366S, L368A, Y407V

(SEQ ID NO: 3177)

EVQLVETGGGLIQPGRSLRLSCAASGFTFSSYAMHWVRQAPGKGLEWVAV
ISYAGEVKYYADSVKGRFTISRDNSKNTLYLQMNSLRAEDTAVYYCARDP
LPLHYYGMDVWGQGTTVTVSSASGQPKAAPSVTLFPPSSEELQANKATLV
CLISDFYPGAVTVAWKADSSPVKAGVETTTPSKQSNNKYAASSYLSLTPE
QWKSHRSYSCQVTHEGSTVEKTVAPTECSESKYGPPCPPCPAPEFLGGPS
VFLFPPKPKDTLMISRTPEVTCVVVDVSQEDPEVQFNWYVDGVEVHNAKT
KPREEQFNSTYRWSVLTVLHQDWLNGKEYKCKVSNKGLPSSIEKTISKAK
GQPREPQVCTLPPSQDELTKNQVSLSCAVKGFYPSDIAVEWESNGQPENN
YKTTPPVLDSDGSFFLVSRLTVDKSRWQEGNVFSCSVMHEALHNHYTQKS
LSLSPGK;
CPA.9.086 LC CH1

(SEQ ID NO: 3178)

QSALTQPRSASGNPGQRVTISCSGSSSNMGRRPVNWYQQIPGTAPKLLIY
SQNQRPSGVPDRFSGSQSGTSASLTISGLQSEDEAEYFCAVWDDIGRVLQ
LGGGTQLAVLSSASTKGPSVFPLAPSSKSTSGGTAALGCLVKDYFPEPVT
VSWNSGALTSGVHTFPAVLQSSGLYSLSSVVTVPSSSLGTQTYICNVNHK
PSNTKVDKKVEPKSC.

[0544] In some embodiments, the anti-PVRIG/anti-TIGIT bispecific antibody formulated into a pharmaceutical composition comprises the following sequences:

Antibody sequence for PVRIG (IMGT CDR
definition bold and underlined)
CHA.7.518.4 VH

(SEQ ID NO: 3179)

QVQLVQSGAEVKKPGASVKVSCKASGYTFTDYNINWVRQAPGQGLEWMGY
IYPYIGGSGYAQKFQGRVTMTRDTSTSTVYMELSSLRSEDTAVYYCARED
KTARNAMDYWGQGTLVTVSS;
CHA.7.518.4 VL

(SEQ ID NO: 3180)

DIQMTQSPSSLSASVGDRVTITCRVSENIYDVLAWYQQKPGKAPKLLIYE
ATNLAEGVPSRFSGSGSGTDFTLTISSLQPEDFATYYCQHFWGTPYTFGQ
GTKLEIK;
and
Antibody sequence for TIGIT (IMGT CDR
definition bold and underlined)
CHA.9.547.18 VH

(SEQ ID NO: 1664)

EVQLVESGGGLVQPGGSLRLSCAASGFTFSSYIMSWVRQAPGKGLEWVAT
ISGGSKGQYYADSVKGRFTISRDNSKNTLYLQMNSLRAEDTAVYYCAKWL
LSYYAMDYWGQGTLVTVSS;
CHA.9.547.18 VL

(SEQ ID NO: 1668)

DIQMTQSPSSLSASVGDRITITCRASQSMAIWLSWYQQKPGKAPKLLIYK
ASKSHTGVPSRFSGSGSGTDFTLTISSLQPEDFATYYCQQGQSYPYTFGQ
GTKLEIK.

[0545] In some embodiments, the anti-PVRIG antibody formulated into a pharmaceutical composition comprises the following sequences:

Antibody sequence for PVRIG (IMGT CDR
definition bold and underlined)
CHA.7.518.4 VH
(SEQ ID NO: 3179)
QVQLVQSGAEVKKPGASVKVSCKASGYTFTDYNINWVRQAPGQGLEWMGY
IYPYIGGSGYAQKFQGRVTMTRDTSTSTVYMELSSLRSEDTAVYYCARED
KTARNAMDYWGQGTLVTVSS;
and
CHA.7.518.4 VL
(SEQ ID NO: 3180)
DIQMTQSPSSLSASVGDRVTITCRVSENIYDVLAWYQQKPGKAPKLLIYE
ATNLAEGVPSRFSGSGSGTDFTLTISSLQPEDFATYYCQHFWGTPYTFGQ
GTKLEIK.

[0546] In some embodiments, the anti-TIGIT antibody formulated into a pharmaceutical composition comprises the following sequences:

Antibody sequence for TIGIT (IMGT CDR
definition bold and underlined)
CHA.9.547.18 VH
(SEQ ID NO: 1664)
EVQLVESGGGLVQPGGSLRLSCAASGFTFSSYIMSWVRQAPGKGLEWVAT
ISGGSKGQYYADSVKGRFTISRDNSKNTLYLQMNSLRAEDTAVYYCAKWL
LSYYAMDYWGQGTLVTVSS;
and
CHA.9.547.18 VL
(SEQ ID NO: 1668)
DIQMTQSPSSLSASVGDRITITCRASQSMAIWLSWYQQKPGKAPKLLIYK
ASKSHTGVPSRFSGSGSGTDFTLTISSLQPEDFATYYCQQGQSYPYTFGQ
GTKLEIK.

[0547] In a preferred embodiment, the pharmaceutical composition that comprises the anti-PVRIG/anti-TIGIT bispecific antibodies of the invention may be in a water-soluble form, such as being present as pharmaceutically acceptable salts, which is meant to include both acid and base addition salts. “Pharmaceutically acceptable acid addition salt” refers to those salts that retain the biological effectiveness of the free bases and that are not biologically or otherwise undesirable, formed with inorganic acids and the like. “Pharmaceutically acceptable base addition salts” include those derived from inorganic bases and the like.

[0548] Administration of the pharmaceutical composition comprising anti-PVRIG/anti-TIGIT bispecific antibodies of the present invention, preferably in the form of a sterile aqueous solution, may be done in a variety of ways, including, but not limited to subcutaneously and intravenously.

[0549] The dosing amounts and frequencies of administration are, in a preferred embodiment, selected to be therapeutically or prophylactically effective. As is known in the art, adjustments for protein degradation, systemic versus localized delivery, and rate of new protease synthesis, as well as the age, body weight, general health, sex, diet, time of administration, drug interaction and the severity of the condition may be necessary, and will be ascertainable with routine experimentation by those skilled in the art.

[0550] In order to treat a patient, a therapeutically effective dose of the Fc variant of the present invention may be administered. By “therapeutically effective dose” herein is meant a dose that produces the effects for which it is administered. The exact dose will depend on the purpose of the treatment, and will be ascertainable by one skilled in the art using known techniques.

### IX. METHODS FOR USING ANTIBODIES

[0551] The anti-PVRIG, anti-TIGIT, and/or anti-PVRIG/anti-TIGIT bispecific antibodies of the invention can be used in a number of diagnostic and therapeutic applications. In some cases, the decision of which anti-PVRIG/anti-TIGIT bispecific antibodies to administer to a patient is done using an evaluation of the expression levels (either gene expression levels or protein expression levels, with the latter being preferred) of sample tumor biopsies to determine whether the sample is overexpressing TIGIT and/or PVRIG, to determine what therapeutic antibody to administer.

[0552] A. Diagnostic Uses

[0553] Accordingly, the anti-PVRIG, anti-TIGIT, and/or anti-PVRIG/anti-TIGIT bispecific antibodies of the invention also find use in the in vitro or in vivo diagnosis, including imaging, of tumors that over-express either PVRIG and/or TIGIT, respectively. It should be noted, however, that as discussed herein, both TIGIT and PVRIG, as immuno-oncology target proteins, are not necessarily overexpressed on cancer cells, but rather within the immune infiltrates in the cancer (for example, in the tumor microenvironment, also referred to as the TME). Thus it is the mechanism of action, e.g., activation of immune cells such as T cells and NK cells, that results in cancer diagnosis. Accordingly, these antibodies can be used to diagnose cancer. Diagnosis using PVRIG antibodies is also outlined in WO 2016/134333, [0434 to 0459], hereby incorporated by reference.

[0554] Generally, diagnosis can be done in several ways. In one embodiment, a tissue from a patient, such as a biopsy sample, is contacted with a anti-PVRIG/anti-TIGIT bispecific antibodies antibody, generally labeled, such that the antibody binds to the endogenous TIGIT. The level of signal is compared to that of normal non-cancerous tissue either from the same patient or a reference sample, to determine the presence or absence of cancer. The biopsy sample can be from a solid tumor, a blood sample (for lymphomas and leukemias such as ALL, T cell lymphoma, etc).

[0555] In general, in this embodiment, the anti-PVRIG, anti-TIGIT, and/or anti-PVRIG/anti-TIGIT bispecific antibodies is labeled, for example with a fluorophore or other optical label, that is detected using a fluorometer or other optical detection system as is well known in the art. In an alternate embodiment, a secondary labeled antibody is contacted with the sample, for example using an anti-human IgG antibody from a different mammal (mouse, rat, rabbit, goat, etc.) to form a sandwich assay as is known in the art. Alternatively, the anti-PVRIG/anti-TIGIT bispecific antibodies could be directly labeled (e.g., with biotin) and detection can be done by a secondary Ab directed to the labeling agent in the art.

[0556] Once over-expression of TIGIT is seen, treatment can proceed with the administration of an anti-PVRIG, anti-TIGIT, and/or anti-PVRIG/anti-TIGIT bispecific antibody according to the invention as outlined herein.

[0557] In other embodiments, in vivo diagnosis is done. Generally, in this embodiment, the anti-TIGIT antibody (including antibody fragments) is injected into the patient and imaging is done. In this embodiment, for example, the anti-PVRIG, anti-TIGIT, and/or anti-PVRIG/anti-TIGIT bispecific antibody is generally labeled with an optical label or an MRI label, such as a gadolinium chelate, radioactive labeling of mAb (including fragments).

[0558] In some embodiments, the anti-PVRIG, anti-TIGIT, and/or anti-PVRIG/anti-TIGIT bispecific antibodies described herein are used for both diagnosis and treatment, or for diagnosis alone. When anti-PVRIG, anti-TIGIT, and/or anti-PVRIG/anti-TIGIT bispecific antibodies are used for both diagnosis and treatment, some embodiments rely on two different anti-PVRIG, anti-TIGIT, and/or anti-PVRIG/anti-TIGIT bispecific antibodies to two different epitopes (for example to two different eptitopes withing TIGIT or PVRIG, or based on their bispecific nature of binding to both PVRIG and TIGIT), such that the diagnostic anti-PVRIG, anti-TIGIT, and/or anti-PVRIG/anti-TIGIT bispecific antibody does not compete for binding with the therapeutic anti-PVRIG, anti-TIGIT, and/or anti-PVRIG/anti-TIGIT bispecific antibody, although in some cases the same antibody can be used for both. For example, this can be done using anti-PVRIG, anti-TIGIT, and/or anti-PVRIG/anti-TIGIT bispecific antibodies that are in different bins, e.g., that bind to different epitopes on TIGIT or different epitopes on PVRIG, such as outlined herein. Thus included in the invention are compositions comprising a diagnostic anti-PVRIG, anti-TIGIT, and/or anti-PVRIG/anti-TIGIT bispecific antibody and an anti-PVRIG, anti-TIGIT, and/or anti-PVRIG/anti-TIGIT bispecific antibody, and in some embodiments, the diagnostic anti-PVRIG, anti-TIGIT, and/or anti-PVRIG/anti-TIGIT bispecific antibody is labeled as described herein. In addition, the composition of therapeutic and diagnostic anti-PVRIG, anti-TIGIT, and/or anti-PVRIG/anti-TIGIT bispecific antibodies can also be co-administered with other drugs as outlined herein.

[0559] Particularly useful anti-PVRIG/anti-TIGIT bispecific antibodies for use in diagnosis include, but are not limited to these enumerated antibodies, or antibodies that utilize the CDRs with variant sequences, or those that compete for binding with any of the antibodies in FIGS. 5A-5H, 7A-7AE, and/or 23A-23D.

[0560] In many embodiments, a diagnostic anti-PVRIG, anti-TIGIT, and/or anti-PVRIG/anti-TIGIT bispecific antibody is labeled. By “labeled” herein is meant that the anti-PVRIG, anti-TIGIT, and/or anti-PVRIG/anti-TIGIT bispecific antibodies disclosed herein have one or more elements, isotopes, or chemical compounds attached to enable the detection in a screen or diagnostic procedure. In general, labels fall into several classes: a) immune labels, which may be an epitope incorporated as a fusion partner that is recognized by an antibody, b) isotopic labels, which may be radioactive or heavy isotopes, c) small molecule labels, which may include fluorescent and colorimetric dyes, or molecules such as biotin that enable other labeling methods, and d) labels such as particles (including bubbles for ultrasound labeling) or paramagnetic labels that allow body imagining. Labels may be incorporated into the anti-PVRIG/anti-TIGIT bispecific antibodies at any position and may be incorporated in vitro or in vivo during protein expression, as is known in the art.

[0561] Diagnosis can be done either in vivo, by administration of a diagnostic antibody that allows whole body imaging as described below, or in vitro, on samples removed from a patient. “Sample” in this context includes any number of things, including, but not limited to, bodily fluids (including, but not limited to, blood, urine, serum, lymph, saliva, anal and vaginal secretions, perspiration and semen), as well as tissue samples such as result from biopsies of relevant tissues.

[0562] In addition, as outlined below and in the Examples and Figures, information regarding the protein expression levels of either PVRIG and/or TIGIT, can be used to determine which antibodies should be administered to a patient.

[0563] B. Cancer Treatment

[0564] The anti-PVRIG, anti-TIGIT, and/or anti-PVRIG/anti-TIGIT bispecific antibodies of the invention find particular use in the treatment of cancer as a monotherapy. Due to the nature of an immuno-oncology mechanism of action, PVRIG and/or TIGIT do not necessarily need to be overexpressed on or correlated with a particular cancer type; that is, the goal is to have the anti-PVRIG/anti-TIGIT bispecific antibodies de-suppress T cell and NK cell activation, such that the immune system will go after the cancers.

[0565] In some embodiments, an anti-PVRIG, anti-TIGIT, and/or anti-PVRIG/anti-TIGIT bispecific antibodies comprising the anti-PVRIG antibody sequences of FIGS. 4A-4AA, 5A-5H, 7A-7AE, 11A-11I, 12A-12E, 13, 14A-14BX, 15A-15B, 16A-16E, 17A-17C, 26A-26B, and/or 40A-40T, find use in the treatment of cancer (including the activation of T cells and/or NK cells as outlined below), in particular those comprising and S241P substitution. While any anti-PVRIG, anti-TIGIT, and/or anti-PVRIG/anti-TIGIT bispecific antibodies comprising the anti-PVRIG antibody sequences of FIGS. 4A-4AA, 5A-5H, 7A-7AE, 11A-11I, 12A-12E, 13, 14A-14BX, 15A-15B, 16A-16E, 17A-17C, 26A-26B, and/or 40A-40T, find use in the treatment of cancer (including the activation of T cells and/or NK cells as outlined below), anti-PVRIG/anti-TIGIT bispecific antibodies comprising CHA.7.518.1, CHA.7.518.4, and/or CHA.7.538.2. find particular use in some embodiments.

[0566] While any anti-PVRIG/anti-TIGIT bispecific antibodies comprising the anti-TIGIT antibody sequences of FIGS. 23A-23D, 24A-24EE, and/or 41A-41T find use in the treatment of cancer (including the activation of T cells/and or NK cells as outlined below), anti-PVRIG/anti-TIGIT bispecific antibodies comprising CPA.9.086.H4(S241P), CPA.9.083.H4(S241P), CHA.9.547.7.H4(S241P), and CHA.9.547.13.H4(S241P), CHA.9.547.18 find particular use in some embodiments.

[0567] In some embodiments, the present invention also provides anti-PVRIG antibodies comprising the anti-PVRIG antibody sequences of FIGS. 4A-4AA, 5A-5H, 7A-7AE, 11A-11I, 12A-12E, 13, 14A-14BX, 15A-15B, 16A-16E, 17A-17C, 26A-26B, and/or 40A-40T, which find use in the treatment of cancer (including the activation of T cells/and or NK cells as outlined below). In some embodiments, the anti-PVRIG antibodies comprise:

Antibody sequence for PVRIG (IMGT CDR
definition bold and underlined)
CHA.7.518.4 VH

(SEQ ID NO: 3179)

QVQLVQSGAEVKKPGASVKVSCKASGYTFTDYNINWVRQAPGQGLEWMGY
IYPYIGGSGYAQKFQGRVTMTRDTSTSTVYMELSSLRSEDTAVYYCARED
KTARNAMDYWGQGTLVTVSS;
and
CHA.7.518.4 VL

(SEQ ID NO: 3180)

DIQMTQSPSSLSASVGDRVTITCRVSENIYDVLAWYQQKPGKAPKLLIYE
ATNLAEGVPSRFSGSGSGTDFTLTISSLQPEDFATYYCQHFWGTPYTFGQ
GTKLEIK.

[0568] The anti-PVRIG/anti-TIGIT bispecific antibodies antibodies of the invention find particular use in the treatment of cancer. In general, the anti-PVRIG/anti-TIGIT bispecific antibodies antibodies of the invention are immunomodulatory, in that rather than directly attack cancerous cells, the antibodies of the invention stimulate the immune system, generally by inhibiting the action of the checkpoint receptor (e.g., PVRIG or TIGIT). Thus, unlike tumor-targeted therapies, which are aimed at inhibiting molecular pathways that are crucial for tumor growth and development, and/or depleting tumor cells, cancer immunotherapy is aimed to stimulate the patient's own immune system to eliminate cancer cells, providing long-lived tumor destruction. Various approaches can be used in cancer immunotherapy, among them are therapeutic cancer vaccines to induce tumor-specific T cell responses, and immunostimulatory antibodies (e.g., antagonists of inhibitory receptors=immune checkpoints) to remove immunosuppressive pathways.

[0569] Clinical responses with targeted therapy or conventional anti-cancer therapies tend to be transient as cancer cells develop resistance, and tumor recurrence takes place. However, the clinical use of cancer immunotherapy in the past few years has shown that this type of therapy can have durable clinical responses, showing dramatic impact on long term survival. However, although responses are long term, only a small number of patients respond (as opposed to conventional or targeted therapy, where a large number of patients respond, but responses are transient).

[0570] By the time a tumor is detected clinically, it has already evaded the immune-defense system by acquiring immunoresistant and immunosuppressive properties and creating an immunosuppressive tumor microenvironment through various mechanisms and a variety of immune cells.

[0571] Accordingly, the anti-PVRIG, anti-TIGIT, and/or anti-PVRIG/anti-TIGIT bispecific antibodies antibodies of the invention are useful in treating cancer. Due to the nature of an immuno-oncology mechanism of action, the checkpoint receptor (TIGIT or PVRIG) does not necessarily need to be overexpressed on or correlated with a particular cancer type; that is, the goal is to have the antibodies de-suppress T cell and NK cell activation, such that the immune system will go after the cancers.

[0572] “Cancer,” as used herein, refers broadly to any neoplastic disease (whether invasive or metastatic) characterized by abnormal and uncontrolled cell division causing malignant growth or tumor (e.g., unregulated cell growth.) The term “cancer” or “cancerous” as used herein should be understood to encompass any neoplastic disease (whether invasive, non-invasive or metastatic) which is characterized by abnormal and uncontrolled cell division causing malignant growth or tumor, non-limiting examples of which are described herein. This includes any physiological condition in mammals that is typically characterized by unregulated cell growth. Examples of cancer are exemplified in the working examples and also are described within the specification.

[0573] Non-limiting examples of cancer that can be treated using the anti-PVRIG/anti-TIGIT bispecific antibodies antibodies of the invention include, but are not limited to, carcinoma, lymphoma, blastoma, sarcoma, and leukemia. More particular examples of such cancers include squamous cell cancer, lung cancer (including small-cell lung cancer, non-small cell lung cancer, adenocarcinoma of the lung, and squamous carcinoma of the lung), cancer of the peritoneum, hepatocellular cancer, gastric or stomach cancer (including gastrointestinal cancer), esophageal cancer, melanoma, mesothelioma, merkel cell cancer, pancreatic cancer, glioblastoma, cervical cancer, ovarian cancer, liver cancer, bladder cancer, hepatoma, breast cancer, colon cancer, colorectal cancer, endometrial or uterine carcinoma, salivary gland carcinoma, kidney or renal cancer, prostate cancer, vulval cancer, thyroid cancer, hepatic carcinoma and various types of head and neck cancer, larynx cancer, oral cavity cancer, urothelial cancer, KRAS mutant tumors, Myelodysplastic syndromes (MDS), as well as B-cell malignancies, B-cell lymphoma (including low grade/follicular non-Hodgkin's lymphoma (NHL); small lymphocytic (SL) NHL; intermediate grade/follicular NHL; intermediate grade diffuse NHL; high grade immunoblastic NHL; high grade lymphoblastic NHL; high grade small non-cleaved cell NHL; bulky disease NHL; mantle cell lymphoma; AIDS-related lymphoma; and Waldenström's Macroglobulinemia); chronic lymphocytic leukemia (CLL); acute lymphoblastic leukemia (ALL); Hairy cell leukemia; chronic myeloblastic leukemia; adult T-cell leukemia/lymphoma; myeloma; multiple myeloma and post-transplant lymphoproliferative disorder (PTLD), lymphoid malignancies, abnormal vascular proliferation associated with phakomatoses, edema (such as that associated with brain tumors), and Meigs' syndrome, rectal cancer, renal cell cancer, soft-tissue sarcoma, Kaposi's sarcoma, carcinoid carcinoma, ovarian early or advanced (including metastatic).

[0574] As shown in the Examples of WO2016/134333, PVRIG is over expressed and/or correlates with tumor lymphocyte infiltration (as demonstrated by correlation to CD3, CD4, CD8 and PD-1 expression) in a number of different tumors of various origins, and thus is useful in treating any cancer, including but not limited to, prostate cancer, liver cancer (HCC), colorectal cancer, ovarian cancer, endometrial cancer, breast cancer, pancreatic cancer, stomach cancer, cervical cancer, head and neck cancer, thyroid cancer, testis cancer, urothelial cancer, lung cancer, melanoma, non melanoma skin cancer (squamous and basal cell carcinoma), glioma, renal cancer (RCC), lymphoma (non-Hodgkins' lymphoma (NHL) and Hodgkin's lymphoma (HD)), Acute myeloid leukemia (AML), T cell Acute Lymphoblastic Leukemia (T-ALL), Diffuse Large B cell lymphoma, testicular germ cell tumors, mesothelioma, and esophageal cancer.

[0575] In particular, anti-PVRIG/anti-TIGIT bispecific antibodies comprising CHA.7.518.1 as the PVRIG binding portion may find use in treating prostate cancer, liver cancer (HCC), colorectal cancer, ovarian cancer, endometrial cancer, breast cancer, triple negative breast cancer, pancreatic cancer, stomach (gastric) cancer, cervical cancer, head and neck cancer, thyroid cancer, testis cancer, urothelial cancer, lung cancer (small cell lung cancer, non-small cell lung cancer), melanoma, non melanoma skin cancer (squamous and basal cell carcinoma), glioma, renal cancer (RCC), lymphoma (NHL or HL), Acute myeloid leukemia (AML), T cell Acute Lymphoblastic Leukemia (T-ALL), Diffuse Large B cell lymphoma, testicular germ cell tumors, mesothelioma, bladder cancer, Merkel Cells cancer, MSI-high cancer, KRAS mutant tumors, adult T-cell leukemia/lymphoma, myeloma and Myelodysplastic syndromes (MDS) esophageal cancer. In some embodiments, the cancer is selected from the group consisting of triple negative breast cancer, stomach (gastric) cancer, lung cancer (small cell lung, non-small cell lung), Merkel Cells cancer, MSI-high cancer, KRAS mutant tumors, adult T-cell leukemia/lymphoma, myeloma and Myelodysplastic syndromes (MDS).

[0576] In particular, anti-PVRIG/anti-TIGIT bispecific antibodies comprising CHA.7.538.1.2 as the PVRIG binding portion may find use in treating prostate cancer, liver cancer (HCC), colorectal cancer, ovarian cancer, endometrial cancer, breast cancer, triple negative breast cancer, pancreatic cancer, stomach (gastric) cancer, cervical cancer, head and neck cancer, thyroid cancer, testis cancer, urothelial cancer, lung cancer (small cell lung cancer, non-small cell lung cancer), melanoma, non melanoma skin cancer (squamous and basal cell carcinoma), glioma, renal cancer (RCC), lymphoma (NHL or HL), Acute myeloid leukemia (AML), T cell Acute Lymphoblastic Leukemia (T-ALL), Diffuse Large B cell lymphoma, testicular germ cell tumors, mesothelioma, bladder cancer, Merkel Cells cancer, MSI-high cancer, KRAS mutant tumors, adult T-cell leukemia/lymphoma, myeloma and Myelodysplastic syndromes (MDS) esophageal cancer. In some embodiments, the cancer is selected from the group consisting of triple negative breast cancer, stomach (gastric) cancer, lung cancer (small cell lung, non-small cell lung), Merkel Cells cancer, MSI-high cancer, KRAS mutant tumors, adult T-cell leukemia/lymphoma, myeloma and Myelodysplastic syndromes (MDS).

[0577] In particular, anti-PVRIG/anti-TIGIT bispecific antibodies comprising CHA.7.518.4 as the PVRIG binding portion may find use in treating prostate cancer, liver cancer (HCC), colorectal cancer, ovarian cancer, endometrial cancer, breast cancer, triple negative breast cancer, pancreatic cancer, stomach (gastric) cancer, cervical cancer, head and neck cancer, thyroid cancer, testis cancer, urothelial cancer, lung cancer (small cell lung cancer, non-small cell lung cancer), melanoma, non melanoma skin cancer (squamous and basal cell carcinoma), glioma, renal cancer (RCC), lymphoma (NHL or HL), Acute myeloid leukemia (AML), T cell Acute Lymphoblastic Leukemia (T-ALL), Diffuse Large B cell lymphoma, testicular germ cell tumors, mesothelioma, bladder cancer, Merkel Cells cancer, MSI-high cancer, KRAS mutant tumors, adult T-cell leukemia/lymphoma, myeloma and Myelodysplastic syndromes (MDS) esophageal cancer. In some embodiments, the cancer is selected from the group consisting of triple negative breast cancer, stomach (gastric) cancer, lung cancer (small cell lung, non-small cell lung), Merkel Cells cancer, MSI-high cancer, KRAS mutant tumors, adult T-cell leukemia/lymphoma, myeloma and Myelodysplastic syndromes (MDS).

[0578] In particular, anti-PVRIG/anti-TIGIT bispecific antibodies comprising CPA.9.086 as the TIGIT binding portion may find use in treating prostate cancer, liver cancer (HCC), colorectal cancer, ovarian cancer, endometrial cancer, breast cancer, triple negative breast cancer, pancreatic cancer, stomach (gastric) cancer, cervical cancer, head and neck cancer, thyroid cancer, testis cancer, urothelial cancer, lung cancer (small cell lung cancer, non-small cell lung cancer), melanoma, non melanoma skin cancer (squamous and basal cell carcinoma), glioma, renal cancer (RCC), lymphoma (NHL or HL), Acute myeloid leukemia (AML), T cell Acute Lymphoblastic Leukemia (T-ALL), Diffuse Large B cell lymphoma, testicular germ cell tumors, mesothelioma, bladder cancer, Merkel Cells cancer, MSI-high cancer, KRAS mutant tumors, adult T-cell leukemia/lymphoma, myeloma and Myelodysplastic syndromes (MDS) esophageal cancer. In some embodiments, the cancer is selected from the group consisting of triple negative breast cancer, stomach (gastric) cancer, lung cancer (small cell lung, non-small cell lung), Merkel Cells cancer, MSI-high cancer, KRAS mutant tumors, adult T-cell leukemia/lymphoma, myeloma and Myelodysplastic syndromes (MDS).

[0579] In particular, anti-PVRIG/anti-TIGIT bispecific antibodies comprising CPA.9.083 as the TIGIT binding portion may find use in treating prostate cancer, liver cancer (HCC), colorectal cancer, ovarian cancer, endometrial cancer, breast cancer, triple negative breast cancer, pancreatic cancer, stomach (gastric) cancer, cervical cancer, head and neck cancer, thyroid cancer, testis cancer, urothelial cancer, lung cancer (small cell lung cancer, non-small cell lung cancer), melanoma, non melanoma skin cancer (squamous and basal cell carcinoma), glioma, renal cancer (RCC), lymphoma (NHL or HL), Acute myeloid leukemia (AML), T cell Acute Lymphoblastic Leukemia (T-ALL), Diffuse Large B cell lymphoma, testicular germ cell tumors, mesothelioma, bladder cancer, Merkel Cells cancer, MSI-high cancer, KRAS mutant tumors, adult T-cell leukemia/lymphoma, myeloma and Myelodysplastic syndromes (MDS) esophageal cancer. In some embodiments, the cancer is selected from the group consisting of triple negative breast cancer, stomach (gastric) cancer, lung cancer (small cell lung, non-small cell lung), Merkel Cells cancer, MSI-high cancer, KRAS mutant tumors, adult T-cell leukemia/lymphoma, myeloma and Myelodysplastic syndromes (MDS).

[0580] In particular, anti-PVRIG/anti-TIGIT bispecific antibodies comprising CHA.9.547.7 as the TIGIT binding portion may find use in treating prostate cancer, liver cancer (HCC), colorectal cancer, ovarian cancer, endometrial cancer, breast cancer, triple negative breast cancer, pancreatic cancer, stomach (gastric) cancer, cervical cancer, head and neck cancer, thyroid cancer, testis cancer, urothelial cancer, lung cancer (small cell lung cancer, non-small cell lung cancer), melanoma, non melanoma skin cancer (squamous and basal cell carcinoma), glioma, renal cancer (RCC), lymphoma (NHL or HL), Acute myeloid leukemia (AML), T cell Acute Lymphoblastic Leukemia (T-ALL), Diffuse Large B cell lymphoma, testicular germ cell tumors, mesothelioma, bladder cancer, Merkel Cells cancer, MSI-high cancer, KRAS mutant tumors, adult T-cell leukemia/lymphoma, myeloma and Myelodysplastic syndromes (MDS) esophageal cancer. In some embodiments, the cancer is selected from the group consisting of triple negative breast cancer, stomach (gastric) cancer, lung cancer (small cell lung, non-small cell lung), Merkel Cells cancer, MSI-high cancer, KRAS mutant tumors, adult T-cell leukemia/lymphoma, myeloma and Myelodysplastic syndromes (MDS).

[0581] In particular, anti-PVRIG/anti-TIGIT bispecific antibodies comprising CHA.9.547.13 as the TIGIT binding portion may find use in treating prostate cancer, liver cancer (HCC), colorectal cancer, ovarian cancer, endometrial cancer, breast cancer, triple negative breast cancer, pancreatic cancer, stomach (gastric) cancer, cervical cancer, head and neck cancer, thyroid cancer, testis cancer, urothelial cancer, lung cancer (small cell lung cancer, non-small cell lung cancer), melanoma, non melanoma skin cancer (squamous and basal cell carcinoma), glioma, renal cancer (RCC), lymphoma (NHL or HL), Acute myeloid leukemia (AML), T cell Acute Lymphoblastic Leukemia (T-ALL), Diffuse Large B cell lymphoma, testicular germ cell tumors, mesothelioma, bladder cancer, Merkel Cells cancer, MSI-high cancer, KRAS mutant tumors, adult T-cell leukemia/lymphoma, myeloma and Myelodysplastic syndromes (MDS) esophageal cancer. In some embodiments, the cancer is selected from the group consisting of triple negative breast cancer, stomach (gastric) cancer, lung cancer (small cell lung, non-small cell lung), Merkel Cells cancer, MSI-high cancer, KRAS mutant tumors, adult T-cell leukemia/lymphoma, myeloma and Myelodysplastic syndromes (MDS).

[0582] In particular, anti-PVRIG/anti-TIGIT bispecific antibodies comprising CPA.9.547.18 as the TIGIT binding portion may find use in treating prostate cancer, liver cancer (HCC), colorectal cancer, ovarian cancer, endometrial cancer, breast cancer, triple negative breast cancer, pancreatic cancer, stomach (gastric) cancer, cervical cancer, head and neck cancer, thyroid cancer, testis cancer, urothelial cancer, lung cancer (small cell lung cancer, non-small cell lung cancer), melanoma, non melanoma skin cancer (squamous and basal cell carcinoma), glioma, renal cancer (RCC), lymphoma (NHL or HL), Acute myeloid leukemia (AML), T cell Acute Lymphoblastic Leukemia (T-ALL), Diffuse Large B cell lymphoma, testicular germ cell tumors, mesothelioma, bladder cancer, Merkel Cells cancer, MSI-high cancer, KRAS mutant tumors, adult T-cell leukemia/lymphoma, myeloma and Myelodysplastic syndromes (MDS) esophageal cancer. In some embodiments, the cancer is selected from the group consisting of triple negative breast cancer, stomach (gastric) cancer, lung cancer (small cell lung, non-small cell lung), Merkel Cells cancer, MSI-high cancer, KRAS mutant tumors, adult T-cell leukemia/lymphoma, myeloma and Myelodysplastic syndromes (MDS).

[0583] In particular, anti-PVRIG/anti-TIGIT bispecific antibodies comprising the following sequences may find use in treating prostate cancer, liver cancer (HCC), colorectal cancer, ovarian cancer, endometrial cancer, breast cancer, triple negative breast cancer, pancreatic cancer, stomach (gastric) cancer, cervical cancer, head and neck cancer, thyroid cancer, testis cancer, urothelial cancer, lung cancer (small cell lung cancer, non-small cell lung cancer), melanoma, non melanoma skin cancer (squamous and basal cell carcinoma), glioma, renal cancer (RCC), lymphoma (NHL or HL), Acute myeloid leukemia (AML), T cell Acute Lymphoblastic Leukemia (T-ALL), Diffuse Large B cell lymphoma, testicular germ cell tumors, mesothelioma, bladder cancer, esophageal cancer Merkel Cells cancer, MSI-high cancer, KRAS mutant tumors, adult T-cell leukemia/lymphoma, myeloma and Myelodysplastic syndromes (MDS), wherein the anti-PVRIG/anti-TIGIT bispecific comprises the following sequences:

CHA.7.518.1.H4(S241P) VH IgG1 CH1 IgG4 CH2—CH3
S354C, E356D, M358L, T366W

(SEQ ID NO: 3175)

QVQLVQSGAEVKKPGASVKVSCKASGYTFTDYNINWVRQAPGQGLEWMGY
IYPYIGGSGYAQKFQGRVTMTRDTSTSTVYMELSSLRSEDTAVYYCARED
KTARNAMDYWGQGTLVTVSSASTKGPSVFPLAPCSRSTSESTAALGCLVK
DYFPEPVTVSWNSGALTSGVHTFPAVLQSSGLYSLSSVVTVPSSSLGTKT
YTCNVDHKPSNTKVDKRVESKYGPPCPPCPAPEFLGGPSVFLFPPKPKDT
LMISRTPEVTCVVVDVSQEDPEVQFNWYVDGVEVHNAKTKPREEQFNSTY
RVVSVLTVLHQDWLNGKEYKCKVSNKGLPSSIEKTISKAKGQPREPQVYT
LPPCQDELTKNQVSLWCLVKGFYPSDIAVEWESNGQPENNYKTTPPVLDS
DGSFFLYSRLTVDKSRWQEGNVFSCSVMHEALHNHYTQKSLSLSPGK;
CHA.7.518.1.H4(S241P) VL Ckappa

(SEQ ID NO: 3176)

DIQMTQSPSSLSASVGDRVTITCRVSENIYSNLAWYQQKPGKAPKLLIYE
ATNLAEGVPSRFSGSGSGTDFTLTISSLQPEDFATYYCQHFWGTPYTFGQ
GTKLEIKRTVAAPSVFIFPPSDEQLKSGTASVVCLLNNFYPREAKVQWKV
DNALQSGNSQESVTEQDSKDSTYSLSSTLTLSKADYEKHKVYACEVTHQG
LSSPVTKSFNRGEC;
and
CPA.9.086 HC Clambda Crossmab IgG4 Y349C, E356D,
M358L, T366S, L368A, Y407V

(SEQ ID NO: 3177)

EVQLVETGGGLIQPGRSLRLSCAASGFTFSSYAMHWVRQAPGKGLEWVAV
ISYAGEVKYYADSVKGRFTISRDNSKNTLYLQMNSLRAEDTAVYYCARDP
LPLHYYGMDVWGQGTTVTVSSASGQPKAAPSVTLFPPSSEELQANKATLV
CLISDFYPGAVTVAWKADSSPVKAGVETTTPSKQSNNKYAASSYLSLTPE
QWKSHRSYSCQVTHEGSTVEKTVAPTECSESKYGPPCPPCPAPEFLGGPS
VFLFPPKPKDTLMISRTPEVTCVVVDVSQEDPEVQFNWYVDGVEVHNAKT
KPREEQFNSTYRVVSVLTVLHQDWLNGKEYKCKVSNKGLPSSIEKTISKA
KGQPREPQVCTLPPSQDELTKNQVSLSCAVKGFYPSDIAVEWESNGQPEN
NYKTTPPVLDSDGSFFLVSRLTVDKSRWQEGNVFSCSVMHEALHNHYTQK
SLSLSPGK;
CPA.9.086 LC CH1

(SEQ ID NO: 3178)

QSALTQPRSASGNPGQRVTISCSGSSSNMGRRPVNWYQQIPGTAPKLLIY
SQNQRPSGVPDRFSGSQSGTSASLTISGLQSEDEAEYFCAVWDDIGRVLQ
LGGGTQLAVLSSASTKGPSVFPLAPSSKSTSGGTAALGCLVKDYFPEPVT
VSWNSGALTSGVHTFPAVLQSSGLYSLSSVVTVPSSSLGTQTYICNVNHK
PSNTKVDKKVEPKSC.

[0584] In some embodiments, the cancer is selected from the group consisting of triple negative breast cancer, stomach (gastric) cancer, lung cancer (small cell lung, non-small cell lung), Merkel Cells cancer, MSI-high cancer, KRAS mutant tumors, adult T-cell leukemia/lymphoma, myeloma and Myelodysplastic syndromes (MDS).

[0585] In particular, anti-PVRIG/anti-TIGIT bispecific antibodies comprising the following sequences may find use in treating prostate cancer, liver cancer (HCC), colorectal cancer, ovarian cancer, endometrial cancer, breast cancer, triple negative breast cancer, pancreatic cancer, stomach (gastric) cancer, cervical cancer, head and neck cancer, thyroid cancer, testis cancer, urothelial cancer, lung cancer (small cell lung cancer, non-small cell lung cancer), melanoma, non melanoma skin cancer (squamous and basal cell carcinoma), glioma, renal cancer (RCC), lymphoma (NHL or HL), Acute myeloid leukemia (AML), T cell Acute Lymphoblastic Leukemia (T-ALL), Diffuse Large B cell lymphoma, testicular germ cell tumors, mesothelioma, bladder cancer, esophageal cancer Merkel Cells cancer, MSI-high cancer, KRAS mutant tumors, adult T-cell leukemia/lymphoma, myeloma and Myelodysplastic syndromes (MDS), wherein the anti-PVRIG/anti-TIGIT bispecific includes any one of the following anti-PVRIG/anti-TIGIT bispecific antibodies:

an anti-PVRIG/anti-TIGIT bispecific
comprising the following sequences:
CHA.7.518.1 VH

(SEQ ID NO: 1539)

QVQLVQSGAEVKKPGASVKVSCKASGYTFTDYNINWVRQAPGQGLEWMGY
IYPYIGGSGYAQKFQGRVTMTRDTSTSTVYMELSSLRSEDTAVYYCARED
KTARNAMDYWGQGTLVTVSS;
CHA.7.518.1 VL

(SEQ ID NO: 1544)

DIQMTQSPSSLSASVGDRVTITCRVSENIYSNLAWYQQKPGKAPKLLIYE
ATNLAEGVPSRFSGSGSGTDFTLTISSLQPEDFATYYCQHFWGTPYTFGQ
GTKLEIK;
and
CPA.9.086 VH

(SEQ ID NO: 1634)

EVQLVETGGGLIQPGRSLRLSCAASGFTFSSYAMHWVRQAPGKGLEWVAV
ISYAGEVKYYADSVKGRFTISRDNSKNTLYLQMNSLRAEDTAVYYCARDP
LPLHYYGMDVWGQGTTVTVSS;
CPA.9.086 VL

(SEQ ID NO: 1639)

QSALTQPRSASGNPGQRVTISCSGSSSNMGRRPVNWYQQIPGTAPKLLIY
SQNQRPSGVPDRFSGSQSGTSASLTISGLQSEDEAEYFCAVWDDIGRVLQ
LGGGTQLAVL;
OR
an anti-PVRIG/anti-TIGIT bispecific
comprising the following sequences:
CHA.7.518.4 VH

(SEQ ID NO: 3179)

QVQLVQSGAEVKKPGASVKVSCKASGYTFTDYNINWVRQAPGQGLEWMGY
IYPYIGGSGYAQKFQGRVTMTRDTSTSTVYMELSSLRSEDTAVYYCARED
KTARNAMDYWGQGTLVTVSS;
CHA.7.518.4 VL

(SEQ ID NO: 3180)

DIQMTQSPSSLSASVGDRVTITCRVSENIYDVLAWYQQKPGKAPKLLIYE
ATNLAEGVPSRFSGSGSGTDFTLTISSLQPEDFATYYCQHFWGTPYTFGQ
GTKLEIK;
And
CPA.9.086 VH

(SEQ ID NO: 1634)

EVQLVETGGGLIQPGRSLRLSCAASGFTFSSYAMHWVRQAPGKGLEWVAV
ISYAGEVKYYADSVKGRFTISRDNSKNTLYLQMNSLRAEDTAVYYCARDP
LPLHYYGMDVWGQGTTVTVSS;
CPA.9.086 VL

(SEQ ID NO: 1639)

QSALTQPRSASGNPGQRVTISCSGSSSNMGRRPVNWYQQIPGTAPKLLIY
SQNQRPSGVPDRFSGSQSGTSASLTISGLQSEDEAEYFCAVWDDIGRVLQ
LGGGTQLAVL;
OR
an anti-PVRIG/anti-TIGIT bispecific
comprising the following sequences:
CHA.7.518.1 VH

(SEQ ID NO: 1539)

QVQLVQSGAEVKKPGASVKVSCKASGYTFTDYNINWVRQAPGQGLEWMGY
IYPYIGGSGYAQKFQGRVTMTRDTSTSTVYMELSSLRSEDTAVYYCARED
KTARNAMDYWGQGTLVTVSS;
CHA.7.518.1 VL

(SEQ ID NO: 1544)

DIQMTQSPSSLSASVGDRVTITCRVSENIYSNLAWYQQKPGKAPKLLIYE
ATNLAEGVPSRFSGSGSGTDFTLTISSLQPEDFATYYCQHFWGTPYTFGQ
GTKLEIK;
and
CHA.9.547.18 VH

(SEQ ID NO: 1664)

EVQLVESGGGLVQPGGSLRLSCAASGFTFSSYIMSWVRQAPGKGLEWVAT
ISGGSKGQYYADSVKGRFTISRDNSKNTLYLQMNSLRAEDTAVYYCAKWL
LSYYAMDYWGQGTLVTVSS;
CHA.9.547.18 VL

(SEQ ID NO: 1668)

DIQMTQSPSSLSASVGDRITITCRASQSMAIWLSWYQQKPGKAPKLLIYK
ASKSHTGVPSRFSGSGSGTDFTLTISSLQPEDFATYYCQQGQSYPYTFGQ
GTKLEIK;
OR
an anti-PVRIG/anti-TIGIT bispecific
comprising the following sequences:
CHA.7.518.4 VH

(SEQ ID NO: 3179)

QVQLVQSGAEVKKPGASVKVSCKASGYTFTDYNINWVRQAPGQGLEWMGY
IYPYIGGSGYAQKFQGRVTMTRDTSTSTVYMELSSLRSEDTAVYYCARED
KTARNAMDYWGQGTLVTVSS;
CHA.7.518.4 VL

(SEQ ID NO: 3180)

DIQMTQSPSSLSASVGDRVTITCRVSENIYDVLAWYQQKPGKAPKLLIYE
ATNLAEGVPSRFSGSGSGTDFTLTISSLQPEDFATYYCQHFWGTPYTFGQ
GTKLEIK;
and
CHA.9.547.18 VH

(SEQ ID NO: 1664)

EVQLVESGGGLVQPGGSLRLSCAASGFTFSSYIMSWVRQAPGKGLEWVAT
ISGGSKGQYYADSVKGRFTISRDNSKNTLYLQMNSLRAEDTAVYYCAKWL
LSYYAMDYWGQGTLVTVSS;
CHA.9.547.18 VL

(SEQ ID NO: 1668)

DIQMTQSPSSLSASVGDRITITCRASQSMAIWLSWYQQKPGKAPKLLIYK
ASKSHTGVPSRFSGSGSGTDFTLTISSLQPEDFATYYCQQGQSYPYTFGQ
GTKLEIK.

[0586] In some embodiments, the cancer is selected from the group consisting of triple negative breast cancer, stomach (gastric) cancer, lung cancer (small cell lung, non-small cell lung), Merkel Cells cancer, MSI-high cancer, KRAS mutant tumors, adult T-cell leukemia/lymphoma, myeloma and Myelodysplastic syndromes (MDS).

[0587] In particular, anti-PVRIG antibodies comprising the following sequences may find use in treating prostate cancer, liver cancer (HCC), colorectal cancer, ovarian cancer, endometrial cancer, breast cancer, triple negative breast cancer, pancreatic cancer, stomach (gastric) cancer, cervical cancer, head and neck cancer, thyroid cancer, testis cancer, urothelial cancer, lung cancer (small cell lung cancer, non-small cell lung cancer), melanoma, non melanoma skin cancer (squamous and basal cell carcinoma), glioma, renal cancer (RCC), lymphoma (NHL or HL), Acute myeloid leukemia (AML), T cell Acute Lymphoblastic Leukemia (T-ALL), Diffuse Large B cell lymphoma, testicular germ cell tumors, mesothelioma, bladder cancer, esophageal cancer Merkel Cells cancer, MSI-high cancer, KRAS mutant tumors, adult T-cell leukemia/lymphoma, myeloma and Myelodysplastic syndromes (MDS), wherein the anti-PVRIG/anti-TIGIT bispecific includes any one of the following anti-PVRIG/anti-TIGIT bispecific antibodies:

an anti-PVRIG/anti-TIGIT bispecific
comprising the following sequences:
CHA.7.518.1 VH

(SEQ ID NO: 1539)

QVQLVQSGAEVKKPGASVKVSCKASGYTFTDYNINWVRQAPGQGLEWMGY
IYPYIGGSGYAQKFQGRVTMTRDTSTSTVYMELSSLRSEDTAVYYCARED
KTARNAMDYWGQGTLVTVSS;
CHA.7.518.1 VL

(SEQ ID NO: 1544)

DIQMTQSPSSLSASVGDRVTITCRVSENIYSNLAWYQQKPGKAPKLLIYE
ATNLAEGVPSRFSGSGSGTDFTLTISSLQPEDFATYYCQHFWGTPYTFGQ
GTKLEIK;
and
CPA.9.086 VH

(SEQ ID NO: 1634)

EVQLVETGGGLIQPGRSLRLSCAASGFTFSSYAMHWVRQAPGKGLEWVAV
ISYAGEVKYYADSVKGRFTISRDNSKNTLYLQMNSLRAEDTAVYYCARDP
LPLHYYGMDVWGQGTTVTVSS;
CPA.9.086 VL

(SEQ ID NO: 1639)

QSALTQPRSASGNPGQRVTISCSGSSSNMGRRPVNWYQQIPGTAPKLLIY
SQNQRPSGVPDRFSGSQSGTSASLTISGLQSEDEAEYFCAVWDDIGRVLQ
LGGGTQLAVL;
OR
an anti-PVRIG/anti-TIGIT bispecific
comprising the following sequences:
CHA.7.518.4 VH

(SEQ ID NO: 3179)

QVQLVQSGAEVKKPGASVKVSCKASGYTFTDYNINWVRQAPGQGLEWMGY
IYPYIGGSGYAQKFQGRVTMTRDTSTSTVYMELSSLRSEDTAVYYCARED
KTARNAMDYWGQGTLVTVSS;
CHA.7.518.4 VL

(SEQ ID NO: 3180)

DIQMTQSPSSLSASVGDRVTITCRVSENIYDVLAWYQQKPGKAPKLLIYE
ATNLAEGVPSRFSGSGSGTDFTLTISSLQPEDFATYYCQHFWGTPYTFGQ
GTKLEIK;
and
CPA.9.086 VH

(SEQ ID NO: 1634)

EVQLVETGGGLIQPGRSLRLSCAASGFTFSSYAMHWVRQAPGKGLEWVAV
ISYAGEVKYYADSVKGRFTISRDNSKNTLYLQMNSLRAEDTAVYYCARDP
LPLHYYGMDVWGQGTTVTVSS;
CPA.9.086 VL

(SEQ ID NO: 1639)

QSALTQPRSASGNPGQRVTISCSGSSSNMGRRPVNWYQQIPGTAPKLLIY
SQNQRPSGVPDRFSGSQSGTSASLTISGLQSEDEAEYFCAVWDDIGRVLQ
LGGGTQLAVL;
OR
an anti-PVRIG/anti-TIGIT bispecific
comprising the following sequences:
CHA.7.518.1 VH

(SEQ ID NO: 1539)

QVQLVQSGAEVKKPGASVKVSCKASGYTFTDYNINWVRQAPGQGLEWMGY
IYPYIGGSGYAQKFQGRVTMTRDTSTSTVYMELSSLRSEDTAVYYCARED
KTARNAMDYWGQGTLVTVSS;
CHA.7.518.1 VL

(SEQ ID NO: 1544)

DIQMTQSPSSLSASVGDRVTITCRVSENIYSNLAWYQQKPGKAPKLLIYE
ATNLAEGVPSRFSGSGSGTDFTLTISSLQPEDFATYYCQHFWGTPYTFGQ
GTKLEIK;
and
CHA.9.547.18 VH

(SEQ ID NO: 1664)

EVQLVESGGGLVQPGGSLRLSCAASGFTFSSYIMSWVRQAPGKGLEWVAT
ISGGSKGQYYADSVKGRFTISRDNSKNTLYLQMNSLRAEDTAVYYCAKWL
LSYYAMDYWGQGTLVTVSS;
CHA.9.547.18 VL

(SEQ ID NO: 1668)

DIQMTQSPSSLSASVGDRITITCRASQSMAIWLSWYQQKPGKAPKLLIYK
ASKSHTGVPSRFSGSGSGTDFTLTISSLQPEDFATYYCQQGQSYPYTFGQ
GTKLEIK;
OR
an anti-PVRIG/anti-TIGIT bispecific
comprising the following sequences:
CHA.7.518.4 VH

(SEQ ID NO: 3179)

QVQLVQSGAEVKKPGASVKVSCKASGYTFTDYNINWVRQAPGQGLEWMGY
IYPYIGGSGYAQKFQGRVTMTRDTSTSTVYMELSSLRSEDTAVYYCARED
KTARNAMDYWGQGTLVTVSS;
CHA.7.518.4 VL

(SEQ ID NO: 3180)

DIQMTQSPSSLSASVGDRVTITCRVSENIYDVLAWYQQKPGKAPKLLIYE
ATNLAEGVPSRFSGSGSGTDFTLTISSLQPEDFATYYCQHFWGTPYTFGQ
GTKLEIK;
and
CHA.9.547.18 VH

(SEQ ID NO: 1664)

EVQLVESGGGLVQPGGSLRLSCAASGFTFSSYIMSWVRQAPGKGLEWVAT
ISGGSKGQYYADSVKGRFTISRDNSKNTLYLQMNSLRAEDTAVYYCAKWL
LSYYAMDYWGQGTLVTVSS;
CHA.9.547.18 VL

(SEQ ID NO: 1668)

DIQMTQSPSSLSASVGDRITITCRASQSMAIWLSWYQQKPGKAPKLLIYK
ASKSHTGVPSRFSGSGSGTDFTLTISSLQPEDFATYYCQQGQSYPYTFGQ
GTKLEIK.

In some embodiments, the cancer is selected from the group consisting of triple negative breast cancer, stomach (gastric) cancer, lung cancer (small cell lung, non-small cell lung), Merkel Cells cancer, MSI-high cancer, KRAS mutant tumors, adult T-cell leukemia/lymphoma, myeloma and Myelodysplastic syndromes (MDS).

[0588] In particular, anti-PVRIG/anti-TIGIT bispecific antibodies comprising the following sequences may find use in treating prostate cancer, liver cancer (HCC), colorectal cancer, ovarian cancer, endometrial cancer, breast cancer, triple negative breast cancer, pancreatic cancer, stomach (gastric) cancer, cervical cancer, head and neck cancer, thyroid cancer, testis cancer, urothelial cancer, lung cancer (small cell lung cancer, non-small cell lung cancer), melanoma, non melanoma skin cancer (squamous and basal cell carcinoma), glioma, renal cancer (RCC), lymphoma (NHL or HL), Acute myeloid leukemia (AML), T cell Acute Lymphoblastic Leukemia (T-ALL), Diffuse Large B cell lymphoma, testicular germ cell tumors, mesothelioma, bladder cancer, esophageal cancer Merkel Cells cancer, MSI-high cancer, KRAS mutant tumors, adult T-cell leukemia/lymphoma, myeloma and Myelodysplastic syndromes (MDS), wherein the anti-PVRIG/anti-TIGIT bispecific includes any one of the following anti-PVRIG/anti-TIGIT bispecific antibodies:

an anti-PVRIG/anti-TIGIT bispecific
comprising the following sequences:
CHA.7.518.1 VH

(SEQ ID NO: 1539)

QVQLVQSGAEVKKPGASVKVSCKASGYTFTDYNINWVRQAPGQGLEWMGY
IYPYIGGSGYAQKFQGRVTMTRDTSTSTVYMELSSLRSEDTAVYYCARED
KTARNAMDYWGQGTLVTVSS;
CHA.7.518.1 VL

(SEQ ID NO: 1544)

DIQMTQSPSSLSASVGDRVTITCRVSENIYSNLAWYQQKPGKAPKLLIYE
ATNLAEGVPSRFSGSGSGTDFTLTISSLQPEDFATYYCQHFWGTPYTFGQ
GTKLEIK;
and
CPA.9.086 VH

(SEQ ID NO: 1634)

EVQLVETGGGLIQPGRSLRLSCAASGFTFSSYAMHWVRQAPGKGLEWVAV
ISYAGEVKYYADSVKGRFTISRDNSKNTLYLQMNSLRAEDTAVYYCARDP
LPLHYYGMDVWGQGTTVTVSS;
CPA.9.086 VL

(SEQ ID NO: 1639)

QSALTQPRSASGNPGQRVTISCSGSSSNMGRRPVNWYQQIPGTAPKLLIY
SQNQRPSGVPDRFSGSQSGTSASLTISGLQSEDEAEYFCAVWDDIGRVLQ
LGGGTQLAVL;
OR
an anti-PVRIG/anti-TIGIT bispecific
comprising the following sequences:
CHA.7.518.4 VH

(SEQ ID NO: 3179)

QVQLVQSGAEVKKPGASVKVSCKASGYTFTDYNINWVRQAPGQGLEWMGY
IYPYIGGSGYAQKFQGRVTMTRDTSTSTVYMELSSLRSEDTAVYYCARED
KTARNAMDYWGQGTLVTVSS;
CHA.7.518.4 VL

(SEQ ID NO: 3180)

DIQMTQSPSSLSASVGDRVTITCRVSENIYDVLAWYQQKPGKAPKLLIYE
ATNLAEGVPSRFSGSGSGTDFTLTISSLQPEDFATYYCQHFWGTPYTFGQ
GTKLEIK;
And
CPA.9.086 VH

(SEQ ID NO: 1634)

EVQLVETGGGLIQPGRSLRLSCAASGFTFSSYAMHWVRQAPGKGLEWVAV
ISYAGEVKYYADSVKGRFTISRDNSKNTLYLQMNSLRAEDTAVYYCARDP
LPLHYYGMDVWGQGTTVTVSS;
CPA.9.086 VL

(SEQ ID NO: 1639)

QSALTQPRSASGNPGQRVTISCSGSSSNMGRRPVNWYQQIPGTAPKLLIY
SQNQRPSGVPDRFSGSQSGTSASLTISGLQSEDEAEYFCAVWDDIGRVLQ
LGGGTQLAVL;
OR
an anti-PVRIG/anti-TIGIT bispecific
comprising the following sequences:
CHA.7.518.1 VH

(SEQ ID NO: 1539)

QVQLVQSGAEVKKPGASVKVSCKASGYTFTDYNINWVRQAPGQGLEWMGY
IYPYIGGSGYAQKFQGRVTMTRDTSTSTVYMELSSLRSEDTAVYYCARED
KTARNAMDYWGQGTLVTVSS;
CHA.7.518.1 VL

(SEQ ID NO: 1544)

DIQMTQSPSSLSASVGDRVTITCRVSENIYSNLAWYQQKPGKAPKLLIYE
ATNLAEGVPSRFSGSGSGTDFTLTISSLQPEDFATYYCQHFWGTPYTFGQ
GTKLEIK;
and
CHA.9.547.18 VH

(SEQ ID NO: 1664)

EVQLVESGGGLVQPGGSLRLSCAASGFTFSSYIMSWVRQAPGKGLEWVAT
ISGGSKGQYYADSVKGRFTISRDNSKNTLYLQMNSLRAEDTAVYYCAKWL
LSYYAMDYWGQGTLVTVSS;
CHA.9.547.18 VL

(SEQ ID NO: 1668)

DIQMTQSPSSLSASVGDRITITCRASQSMAIWLSWYQQKPGKAPKLLIYK
ASKSHTGVPSRFSGSGSGTDFTLTISSLQPEDFATYYCQQGQSYPYTFGQ
GTKLEIK;
OR
an anti-PVRIG/anti-TIGIT bispecific
comprising the following sequences:
CHA.7.518.4 VH

(SEQ ID NO: 3179)

QVQLVQSGAEVKKPGASVKVSCKASGYTFTDYNINWVRQAPGQGLEWMGY
IYPYIGGSGYAQKFQGRVTMTRDTSTSTVYMELSSLRSEDTAVYYCARED
KTARNAMDYWGQGTLVTVSS;
CHA.7.518.4 LC

(SEQ ID NO: 3180)

DIQMTQSPSSLSASVGDRVTITCRVSENIYDVLAWYQQKPGKAPKLLIYE
ATNLAEGVPSRFSGSGSGTDFTLTISSLQPEDFATYYCQHFWGTPYTFGQ
GTKLEIK;
and
CHA.9.547.18 VH

(SEQ ID NO: 1664)

EVQLVESGGGLVQPGGSLRLSCAASGFTFSSYIMSWVRQAPGKGLEWVAT
ISGGSKGQYYADSVKGRFTISRDNSKNTLYLQMNSLRAEDTAVYYCAKWL
LSYYAMDYWGQGTLVTVSS;
CHA.9.547.18 VL

(SEQ ID NO: 1668)

DIQMTQSPSSLSASVGDRITITCRASQSMAIWLSWYQQKPGKAPKLLIYK
ASKSHTGVPSRFSGSGSGTDFTLTISSLQPEDFATYYCQQGQSYPYTFGQ
GTKLEIK.

In some embodiments, the cancer is selected from the group consisting of triple negative breast cancer, stomach (gastric) cancer, lung cancer (small cell lung, non-small cell lung), Merkel Cells cancer, MSI-high cancer, KRAS mutant tumors, adult T-cell leukemia/lymphoma, myeloma and Myelodysplastic syndromes (MDS).

[0589] In particular, anti-PVRIG antibodies comprising the following sequences may find use in treating prostate cancer, liver cancer (HCC), colorectal cancer, ovarian cancer, endometrial cancer, breast cancer, triple negative breast cancer, pancreatic cancer, stomach (gastric) cancer, cervical cancer, head and neck cancer, thyroid cancer, testis cancer, urothelial cancer, lung cancer (small cell lung cancer, non-small cell lung cancer), melanoma, non melanoma skin cancer (squamous and basal cell carcinoma), glioma, renal cancer (RCC), lymphoma (NHL or HL), Acute myeloid leukemia (AML), T cell Acute Lymphoblastic Leukemia (T-ALL), Diffuse Large B cell lymphoma, testicular germ cell tumors, mesothelioma, bladder cancer, esophageal cancer Merkel Cells cancer, MSI-high cancer, KRAS mutant tumors, adult T-cell leukemia/lymphoma, myeloma and Myelodysplastic syndromes (MDS):

an anti-PVRIG antibody comprising
the following sequences:
CHA.7.518.4 VH

(SEQ ID NO: 3179)

(SEQQVQLVQSGAEVKKPGASVKVSCKASGYTFTDYNINWVRQAPGQGLEWMGY
IYPYIGGSGYAQKFQGRVTMTRDTSTSTVYMELSSLRSEDTAVYYCARED
KTARNAMDYWGQGTLVTVSS
and
CHA.7.518.4 VL

(SEQ ID NO: 3180)

(SEQDIQMTQSPSSLSASVGDRVTITCRVSENIYDVLAWYQQKPGKAPKLLIYE
ATNLAEGVPSRFSGSGSGTDFTLTISSLQPEDFATYYCQHFWGTPYTFGQ
GTKLEIK.

In some embodiments, the cancer is selected from the group consisting of triple negative breast cancer, stomach (gastric) cancer, lung cancer (small cell lung, non-small cell lung), Merkel Cells cancer, MSI-high cancer, KRAS mutant tumors, adult T-cell leukemia/lymphoma, myeloma and Myelodysplastic syndromes (MDS).

[0590] C. Combination Therapies

[0591] As is known in the art, combination therapies comprising a therapeutic anti-PVRIG, anti-TIGIT, and/or anti-PVRIG/anti-TIGIT bispecific antibody targeting an immunotherapy target and an additional therapeutic agent, specific for the disease condition, are showing great promise. For example, in the area of immunotherapy, there are a number of promising combination therapies using a chemotherapeutic agent (either a small molecule drug or an anti-tumor antibody) or with an immuno-oncology antibody (for example, an anti-PVRIG/anti-TIGIT bispecific antibody of the invention).

[0592] The terms “in combination with” and “co-administration” are not limited to the administration of the prophylactic or therapeutic agents at exactly the same time. Instead, it is meant that the antibody and the other agent or agents are administered in a sequence and within a time interval such that they may act together to provide a benefit that is increased versus treatment with only either the antibody of the present invention or the other agent or agents. It is preferred that the antibody and the other agent or agents act additively, and especially preferred that they act synergistically. Such molecules are suitably present in combination in amounts that are effective for the purpose intended. The skilled medical practitioner can determine empirically, or by considering the pharmacokinetics and modes of action of the agents, the appropriate dose or doses of each therapeutic agent, as well as the appropriate timings and methods of administration.

[0593] Accordingly, the anti-PVRIG/anti-TIGIT bispecific antibodies of the present invention may be administered concomitantly with one or more other therapeutic regimens or agents. The additional therapeutic regimes or agents may be used to improve the efficacy or safety of the anti-PVRIG, anti-TIGIT, and/or anti-PVRIG/anti-TIGIT bispecific antibody. Also, the additional therapeutic regimes or agents may be used to treat the same disease or a comorbidity rather than to alter the action of the anti-PVRIG/anti-TIGIT bispecific antibody. For example, an anti-PVRIG, anti-TIGIT, and/or anti-PVRIG/anti-TIGIT bispecific antibody of the present invention may be administered to the patient along with chemotherapy, radiation therapy, or both chemotherapy and radiation therapy.

[0594] 1. PVRIG, TIGIT, and/or PVRIG/TIGIT Bispecific Antibodies with Chemotherapeutic Small Molecules

[0595] The anti-PVRIG/anti-TIGIT bispecific antibodies of the present invention may be administered in combination with one or more other prophylactic or therapeutic agents, including but not limited to cytotoxic agents, chemotherapeutic agents, cytokines, growth inhibitory agents, anti-hormonal agents, kinase inhibitors, anti-angiogenic agents, cardioprotectants, immunostimulatory agents, immunosuppressive agents, agents that promote proliferation of hematological cells, angiogenesis inhibitors, protein tyrosine kinase (PTK) inhibitors, or other therapeutic agents.

[0596] In this context, a “chemotherapeutic agent” is a chemical compound useful in the treatment of cancer. Examples of chemotherapeutic agents include alkylating agents such as thiotepa and cyclosphosphamide, alkyl sulfonates such as busulfan, improsulfan and piposulfan; aziridines such as benzodopa, carboquone, meturedopa, and uredopa; ethylenimines and methylamelamines including altretamine, triethylenemelamine, triethylenephosphoramide, triethylenethiophosphoramide and trimethylolomelamine; acetogenins (especially bullatacin and bullatacinone); delta-9-tetrahydrocannabinol (dronabinol, MARINOL′); beta-lapachone; lapachol; colchicines; betulinic acid; a camptothecin (including the synthetic analogue topotecan (HYCAMTN®), CPT-11 (irinotecan, CAMPTOSAR®), acetylcamptothecin, scopolectin, and 9-aminocamptothecin); bryostatin; callystatin; CC-1065 (including its adozelesin, carzelesin and bizelesin synthetic analogues); podophyllotoxin; podophyllinic acid; teniposide; cryptophycins (particularly cryptophycin 1 and cryptophycin 8); dolastatin; duocarmycin (including the synthetic analogues, KW-2189 and CB1-TM1); eleutherobin; pancratistatin; a sarcodictyin; spongistatin; nitrogen mustards such as chlorambucil, chlornaphazine, cholophosphamide, estramustine, ifosfamide, mechlorethamine, mechlorethamine oxide hydrochloride, melphalan, novembichin, phenesterine, prednimustine, trofosfamide, uracil mustard; nitrosoureas such as carmustine, chlorozotocin, fotemustine, lomustine, nimustine, and ranimnustine; antibiotics such as the enediyne antibiotics (e. g., calicheamicin, especially calicheamicin gammall and calicheamicin omegall (see, e.g., Agnew, Chem Intl. Ed. Engl., 33: 183-186 (1994)); dynemicin, including dynemicin A; an esperamicin; as well as neocarzinostatin chromophore and related chromoprotein enediyne antiobiotic chromophores), aclacinomysins, actinomycin, authramycin, azaserine, bleomycins, cactinomycin, carabicin, carminomycin, carzinophilin, chromomycins, dactinomycin, daunorubicin, detorubicin, 6-diazo-5-oxo-L-norleucine, doxorubicin (including morpholino-doxorubicin, cyanomorpholino-doxorubicin, 2-pyrrolino-doxorubicin and deoxydoxorubicin), epirubicin, esorubicin, idarubicin, marcellomycin, mitomycins such as mitomycin C, mycophenolic acid, nogalamycin, olivomycins, peplomycin, porfiromycin, puromycin, quelamycin, rodorubicin, streptonigrin, streptozocin, tubercidin, ubenimex, zinostatin, zorubicin; anti-metabolites such as methotrexate and 5-fluorouracil (5-FU); folic acid analogues such as denopterin, methotrexate, pteropterin, trimetrexate; purine analogs such as fludarabine, 6-mercaptopurine, thiamiprine, thioguanine; pyrimidine analogs such as ancitabine, azacitidine, 6-azauridine, carmofur, cytarabine, dideoxyuridine, doxifluridine, enocitabine, floxuridine; androgens such as calusterone, dromostanolone propionate, epitiostanol, mepitiostane, testolactone; anti-adrenals such as aminoglutethimide, mitotane, trilostane; folic acid replenisher such as frolinic acid; aceglatone; aldophosphamide glycoside; aminolevulinic acid; eniluracil; amsacrine; bestrabucil; bisantrene; edatraxate; defofamine; demecolcine; diaziquone; elfornithine; elliptinium acetate; an epothilone; etoglucid; gallium nitrate; hydroxyurea; lentinan; lonidainine; maytansinoids such as maytansine and ansamitocins; mitoguazone; mitoxantrone; mopidanmol; nitraerine; pentostatin; phenamet; pirarubicin; losoxantrone; 2-ethylhydrazide; procarbazine; PSK® polysaccharide complex (JHS Natural Products, Eugene, Oreg.); razoxane; rhizoxin; sizofiran; spirogermanium; tenuazonic acid; triaziquone; 2,2′,2″-trichlorotriethylamine; trichothecenes (especially T-2 toxin, verracurin A, roridin A and anguidine); urethan; vindesine (ELDISINE®, FILDESIN®); dacarbazine; mannomustine; mitobronitol; mitolactol; pipobroman; gacytosine; arabinoside (“Ara-C”); thiotepa; taxoids, e.g., paclitaxel (TAXOL®; Bristol-Myers Squibb Oncology, Princeton, N.J.), ABRAXANE®, cremophor-free, albumin-engineered nanoparticle formulation of paclitaxel (American Pharmaceutical Partners, Schaumberg, Ill.), and docetaxel (TAXOTERE®; Rhone-Poulenc Rorer, Antony, France); chloranbucil; gemcitabine (GEMZARM®); 6-thioguanine; mercaptopurine; methotrexate; platinum analogs such as cisplatin and carboplatin; vinblastine (VELBAN®); platinum; etoposide (VP-16); ifosfamide; mitoxantrone; vincristine (ONCOVIN®); oxaliplatin; leucovovin; vinorelbine (NAVELBINE®); novantrone; edatrexate; daunomycin; aminopterin; ibandronate; topoisomerase inhibitor RFS 2000; difluoromethylornithine (DMFO); retinoids such as retinoic acid; capecitabine (XELODA®); pharmaceutically acceptable salts, acids or derivatives of any of the above; as well as combinations of two or more of the above such as CHOP, an abbreviation for a combined therapy of cyclophosphamide, doxorubicin, vincristine, and prednisolone; CVP, an abbreviation for a combined therapy of cyclophosphamide, vincristine, and prednisolone; and FOLFOX, an abbreviation for a treatment regimen with oxaliplatin (ELOXATIN®) combined with 5-FU and leucovorin.

[0597] According to at least some embodiments, the anti-PVRIG/anti-TIGIT bispecific antibodies of the inventioncould be used in combination with any of the known in the art standard of care cancer treatment (as can be found, for example, in http://www.cancer.gov/cancertopics).

[0598] Thus, in some cases, the anti-PVRIG/anti-TIGIT bispecific antibodies outlined herein (particularly those including CHA.7.538.1.2 and/or CHA.7.518.1 as the PVRIG binding portion) can be combined with chemotherapeutic agents. Similarly, the anti-PVRIG/anti-TIGIT bispecific outlined herein (particularly those including CPA.9.086, CPA.9.083 and/or CHA.9.547.13 as the TIGIT binding portion) can be combined with chemotherapeutic agents.

[0599] In some embodiments, the anti-PVRIG/anti-TIGIT bispecific antibody that can be combined with chemotherapeutic agents comprises the following sequences:

CHA.7.518.1.H4(S241P) VH IgG1 CH1 IgG4 CH2—CH3
S354C, E356D, M358L, T366W

(SEQ ID NO: 3175)

QVQLVQSGAEVKKPGASVKVSCKASGYTFTDYNINWVRQAPGQGLEWMGY
IYPYIGGSGYAQKFQGRVTMTRDTSTSTVYMELSSLRSEDTAVYYCARED
KTARNAMDYWGQGTLVTVSSASTKGPSVFPLAPCSRSTSESTAALGCLVK
DYFPEPVTVSWNSGALTSGVHTFPAVLQSSGLYSLSSVVTVPSSSLGTKT
YTCNVDHKPSNTKVDKRVESKYGPPCPPCPAPEFLGGPSVFLFPPKPKDT
LMISRTPEVTCVVVDVSQEDPEVQFNWYVDGVEVHNAKTKPREEQFNSTY
RVVSVLTVLHQDWLNGKEYKCKVSNKGLPSSIEKTISKAKGQPREPQVYT
LPPCQDELTKNQVSLWCLVKGFYPSDIAVEWESNGQPENNYKTTPPVLDS
DGSFFLYSRLTVDKSRWQEGNVFSCSVMHEALHNHYTQKSLSLSPGK
CHA.7.518.1.H4(S241P) VL Ckappa

(SEQ ID NO: 3176)

DIQMTQSPSSLSASVGDRVTITCRVSENIYSNLAWYQQKPGKAPKLLIYE
ATNLAEGVPSRFSGSGSGTDFTLTISSLQPEDFATYYCQHFWGTPYTFGQ
GTKLEIKRTVAAPSVFIFPPSDEQLKSGTASVVCLLNNFYPREAKVQWKV
DNALQSGNSQESVTEQDSKDSTYSLSSTLTLSKADYEKHKVYACEVTHQG
LSSPVTKSFNRGEC
CPA.9.086 HC Clambda Crossmab IgG4 Y349C, E356D,
M358L, T366S, L368A, Y407V

(SEQ ID NO: 3177)

EVQLVETGGGLIQPGRSLRLSCAASGFTFSSYAMHWVRQAPGKGLEWVAV
ISYAGEVKYYADSVKGRFTISRDNSKNTLYLQMNSLRAEDTAVYYCARDP
LPLHYYGMDVWGQGTTVTVSSASGQPKAAPSVTLFPPSSEELQANKATLV
CLISDFYPGAVTVAWKADSSPVKAGVETTTPSKQSNNKYAASSYLSLTPE
QWKSHRSYSCQVTHEGSTVEKTVAPTECSESKYGPPCPPCPAPEFLGGPS
VFLFPPKPKDTLMISRTPEVTCVVVDVSQEDPEVQFNWYVDGVEVHNAKT
KPREEQFNSTYRVVSVLTVLHQDWLNGKEYKCKVSNKGLPSSIEKTISKA
KGQPREPQVCTLPPSQDELTKNQVSLSCAVKGFYPSDIAVEWESNGQPEN
NYKTTPPVLDSDGSFFLVSRLTVDKSRWQEGNVFSCSVMHEALHNHYTQK
SLSLSPGK
CPA.9.086 LC CH1

(SEQ ID NO: 3178)

QSALTQPRSASGNPGQRVTISCSGSSSNMGRRPVNWYQQIPGTAPKLLIY
SQNQRPSGVPDRFSGSQSGTSASLTISGLQSEDEAEYFCAVWDDIGRVLQ
LGGGTQLAVLSSASTKGPSVFPLAPSSKSTSGGTAALGCLVKDYFPEPVT
VSWNSGALTSGVHTFPAVLQSSGLYSLSSVVTVPSSSLGTQTYICNVNHK
PSNTKVDKKVEPKSC

[0600] In some embodiments, the anti-PVRIG/anti-TIGIT bispecific antibody that can be combined with chemotherapeutic agents comprises the following sequences:

Antibody sequence for PVRIG (IMGT CDR
definition bold and underlined)
CHA.7.518.4 VH

(SEQ ID NO: 3179)

QVQLVQSGAEVKKPGASVKVSCKASGYTFTDYNINWVRQAPGQGLEWMGY
IYPYIGGSGYAQKFQGRVTMTRDTSTSTVYMELSSLRSEDTAVYYCARED
KTARNAMDYWGQGTLVTVSS;
CHA.7.518.4 VL

(SEQ ID NO: 3180)

DIQMTQSPSSLSASVGDRVTITCRVSENIYDVLAWYQQKPGKAPKLLIYE
ATNLAEGVPSRFSGSGSGTDFTLTISSLQPEDFATYYCQHFWGTPYTFGQ
GTKLEIK;
And
Antibody sequence for TIGIT (IMGT CDR
definition bold and underlined)
CHA.9.547.18 VH

(SEQ ID NO: 1664)

EVQLVESGGGLVQPGGSLRLSCAASGFTFSSYIMSWVRQAPGKGLEWVAT
ISGGSKGQYYADSVKGRFTISRDNSKNTLYLQMNSLRAEDTAVYYCAKWL
LSYYAMDYWGQGTLVTVSS;
CHA.9.547.18 VL

(SEQ ID NO: 1668)

DIQMTQSPSSLSASVGDRITITCRASQSMAIWLSWYQQKPGKAPKLLIYK
ASKSHTGVPSRFSGSGSGTDFTLTISSLQPEDFATYYCQQGQSYPYTFGQ
GTKLEIK.

[0601] In some embodiments, the anti-PVRIG/anti-TIGIT bispecific antibody that can be combined with chemotherapeutic agents comprises the following sequences:

CHA.7.518.1 VH

(SEQ ID NO: 1539)

QVQLVQSGAEVKKPGASVKVSCKASGYTFTDYNINWVRQAPGQGLEWMGY
IYPYIGGSGYAQKFQGRVTMTRDTSTSTVYMELSSLRSEDTAVYYCARED
KTARNAMDYWGQGTLVTVSS
CHA.7.518.1 VL

(SEQ ID NO: 1544)

DIQMTQSPSSLSASVGDRVTITCRVSENIYSNLAWYQQKPGKAPKLLIYE
ATNLAEGVPSRFSGSGSGTDFTLTISSLQPEDFATYYCQHFWGTPYTFGQ
GTKLEIK
And
CPA.9.086 VH

(SEQ ID NO: 1634)

EVQLVETGGGLIQPGRSLRLSCAASGFTFSSYAMHWVRQAPGKGLEWVAV
ISYAGEVKYYADSVKGRFTISRDNSKNTLYLQMNSLRAEDTAVYYCARDP
LPLHYYGMDVWGQGTTVTVSS
CPA.9.086 VL

(SEQ ID NO: 1639)

QSALTQPRSASGNPGQRVTISCSGSSSNMGRRPVNWYQQIPGTAPKLLIY
SQNQRPSGVPDRFSGSQSGTSASLTISGLQSEDEAEYFCAVWDDIGRVLQ
LGGGTQLAVL.

[0602] In some embodiments, the anti-PVRIG/anti-TIGIT bispecific antibody that can be combined with chemotherapeutic agents comprises the following sequences:

CHA.7.518.4 VH

(SEQ ID NO: 3179)

QVQLVQSGAEVKKPGASVKVSCKASGYTFTDYNINWVRQAPGQGLEWMGY
IYPYIGGSGYAQKFQGRVTMTRDTSTSTVYMELSSLRSEDTAVYYCARED
KTARNAMDYWGQGTLVTVSS
CHA.7.518.4 VL

(SEQ ID NO: 3180)

DIQMTQSPSSLSASVGDRVTITCRVSENIYDVLAWYQQKPGKAPKLLIYE
ATNLAEGVPSRFSGSGSGTDFTLTISSLQPEDFATYYCQHFWGTPYTFGQ
GTKLEIK
And
CPA.9.086 VH

(SEQ ID NO: 1634)

EVQLVETGGGLIQPGRSLRLSCAASGFTFSSYAMHWVRQAPGKGLEWVAV
ISYAGEVKYYADSVKGRFTISRDNSKNTLYLQMNSLRAEDTAVYYCARDP
LPLHYYGMDVWGQGTTVTVSS
CPA.9.086 VL

(SEQ ID NO: 1639)

QSALTQPRSASGNPGQRVTISCSGSSSNMGRRPVNWYQQIPGTAPKLLIY
SQNQRPSGVPDRFSGSQSGTSASLTISGLQSEDEAEYFCAVWDDIGRVLQ
LGGGTQLAVL.

[0603] In some embodiments, the anti-PVRIG/anti-TIGIT bispecific antibody that can be combined with chemotherapeutic agents comprises the following sequences:

CHA.7.518.1 VH

(SEQ ID NO: 1539)

QVQLVQSGAEVKKPGASVKVSCKASGYTFTDYNINWVRQAPGQGLEWMGY
IYPYIGGSGYAQKFQGRVTMTRDTSTSTVYMELSSLRSEDTAVYYCARED
KTARNAMDYWGQGTLVTVSS
CHA.7.518.1 VL

(SEQ ID NO: 1544)

DIQMTQSPSSLSASVGDRVTITCRVSENIYSNLAWYQQKPGKAPKLLIYE
ATNLAEGVPSRFSGSGSGTDFTLTISSLQPEDFATYYCQHFWGTPYTFGQ
GTKLEIK
And
CHA.9.547.18 VH

(SEQ ID NO: 1664)

EVQLVESGGGLVQPGGSLRLSCAASGFTFSSYIMSWVRQAPGKGLEWVAT
ISGGSKGQYYADSVKGRFTISRDNSKNTLYLQMNSLRAEDTAVYYCAKWL
LSYYAMDYWGQGTLVTVSS
CHA.9.547.18 VL

(SEQ ID NO: 1668)

DIQMTQSPSSLSASVGDRITITCRASQSMAIWLSWYQQKPGKAPKLLIYK
ASKSHTGVPSRFSGSGSGTDFTLTISSLQPEDFATYYCQQGQSYPYTFGQ
GTKLEIK.

[0604] In some embodiments, the anti-PVRIG/anti-TIGIT bispecific antibody that can be combined with chemotherapeutic agents comprises the following sequences:

CHA.7.518.4 VH

(SEQ ID NO: 3179)

QVQLVQSGAEVKKPGASVKVSCKASGYTFTDYNINWVRQAPGQGLEWMGY
IYPYIGGSGYAQKFQGRVTMTRDTSTSTVYMELSSLRSEDTAVYYCARED
KTARNAMDYWGQGTLVTVSS
CHA.7.518.4 VL

(SEQ ID NO: 3180)

DIQMTQSPSSLSASVGDRVTITCRVSENIYDVLAWYQQKPGKAPKLLIYE
ATNLAEGVPSRFSGSGSGTDFTLTISSLQPEDFATYYCQHFWGTPYTFGQ
GTKLEIK
And
CHA.9.547.18 VH

(SEQ ID NO: 1664)

EVQLVESGGGLVQPGGSLRLSCAASGFTFSSYIMSWVRQAPGKGLEWVAT
ISGGSKGQYYADSVKGRFTISRDNSKNTLYLQMNSLRAEDTAVYYCAKWL
LSYYAMDYWGQGTLVTVSS
CHA.9.547.18 VL

(SEQ ID NO: 1668)

DIQMTQSPSSLSASVGDRITITCRASQSMAIWLSWYQQKPGKAPKLLIYK
ASKSHTGVPSRFSGSGSGTDFTLTISSLQPEDFATYYCQQGQSYPYTFGQ
GTKLEIK.

[0605] D. Assessment of Treatment

[0606] Generally, the anti-PVRIG, anti-TIGIT, and/or anti-PVRIG/anti-TIGIT bispecific antibodies of the invention, are administered to patients with cancer, and efficacy is assessed, in a number of ways as described herein. Thus, while standard assays of efficacy can be run, such as cancer load, size of tumor, evaluation of presence or extent of metastasis, etc., immuno-oncology treatments can be assessed on the basis of immune status evaluations as well. This can be done in a number of ways, including both in vitro and in vivo assays. For example, evaluation of changes in immune status (e.g. presence of ICOS+CD4+ T cells following ipi treatment) along with “old fashioned” measurements such as tumor burden, size, invasiveness, LN involvement, metastasis, etc. can be done. Thus, any or all of the following can be evaluated: the inhibitory effects of PVRIG or TIGIT on CD4⁺ T cell activation or proliferation, CD8⁺ T (CTL) cell activation or proliferation, CD8⁺ T cell-mediated cytotoxic activity and/or CTL mediated cell depletion, NK cell activity and NK mediated cell depletion, the potentiating effects of PVRIG or TIGIT on Treg cell differentiation and proliferation and Treg- or myeloid derived suppressor cell (MDSC)-mediated immunosuppression or immune tolerance, and/or the effects of PVRIG or TIGIT on proinflammatory cytokine production by immune cells, e.g., IL-2, IFN-γ or TNF-α production by T or other immune cells.

[0607] In some embodiments, assessment of treatment is done by evaluating immune cell proliferation, using for example, CFSE dilution method, Ki67 intracellular staining of immune effector cells, and 3H-Thymidine incorporation method.

[0608] In some embodiments, assessment of treatment is done by evaluating the increase in gene expression or increased protein levels of activation-associated markers, including one or more of: CD25, CD69, CD137, ICOS, PD1, GITR, OX40, and cell degranulation measured by surface expression of CD107A.

[0609] In some embodiments, the assessment of treatment is done by assessing the amount of T cell proliferation in the absence of treatment, for example prior to administration of the antibodies of the invention. If, after administration, the patient has an increase in T cell proliferation, e.g. a subset of the patient's T cells are proliferating, this is an indication that the T cells were activated.

[0610] Similarly, assessment of treatment with the antibodies of the invention can be done by measuring the patient's IFNγ levels prior to administration and post-administration to assess efficacy of treatment. This may be done within hours or days.

[0611] In general, gene expression assays are done as is known in the art. See for example Goodkind et al., Computers and Chem. Eng. 29(3):589 (2005), Han et al., Bioinform. Biol. Insights 11/15/15 9(Suppl. 1):29-46, Campo et al., Nod. Pathol. 2013 January; 26 suppl. 1:S97-S110, the gene expression measurement techniques of which are expressly incorporated by reference herein.

[0612] In general, protein expression measurements are also similarly done as is known in the art, see for example, Wang et al., Recent Advances in Capillary Electrophoresis-Based Proteomic Techniques for Biomarker Discovery, Methods. Mol. Biol. 2013:984:1-12; Taylor et al, BioMed Res. Volume 2014, Article ID 361590, 8 pages, Becerk et al., Mutat. Res 2011 Jun. 17:722(2): 171-182, the measurement techniques of which are expressly incorporated herein by reference.

[0613] In some embodiments, assessment of treatment is done by assessing cytotoxic activity measured by target cell viability detection via estimating numerous cell parameters such as enzyme activity (including protease activity), cell membrane permeability, cell adherence, ATP production, co-enzyme production, and nucleotide uptake activity. Specific examples of these assays include, but are not limited to, Trypan Blue or PI staining, ⁵¹Cr or ³⁵S release method, LDH activity, MTT and/or WST assays, Calcein-AM assay, Luminescent based assay, and others.

[0614] In some embodiments, assessment of treatment is done by assessing T cell activity measured by cytokine production, measure either intracellularly in culture supernatant using cytokines including, but not limited to, IFNγ, TNFα, GM-CSF, IL2, IL6, IL4, IL5, IL10, IL13 using well known techniques.

[0615] Accordingly, assessment of treatment can be done using assays that evaluate one or more of the following: (i) increases in immune response, (ii) increases in activation of αβ and/or γδ T cells, (iii) increases in cytotoxic T cell activity, (iv) increases in NK and/or NKT cell activity, (v) alleviation of αβ and/or γδ T-cell suppression, (vi) increases in pro-inflammatory cytokine secretion, (vii) increases in IL-2 secretion; (viii) increases in interferon-γ production, (ix) increases in Th1 response, (x) decreases in Th2 response, (xi) decreases or eliminates cell number and/or activity of at least one of regulatory T cells (Tregs).

[0616] E. Assays to Measure Efficacy

[0617] In some embodiments, T cell activation is assessed using a Mixed Lymphocyte Reaction (MLR) assay as is described in the Examples. An increase in activity indicates immunostimulatory activity. Appropriate increases in activity are outlined below.

[0618] In one embodiment, the signaling pathway assay measures increases or decreases in immune response as measured for an example by phosphorylation or de-phosphorylation of different factors, or by measuring other post translational modifications. An increase in activity indicates immunostimulatory activity. Appropriate increases in activity are outlined below.

[0619] In one embodiment, the signaling pathway assay measures increases or decreases in activation of αβ and/or γδ T cells as measured for an example by cytokine secretion or by proliferation or by changes in expression of activation markers like for an example CD137, CD107a, PD1, etc. An increase in activity indicates immunostimulatory activity. Appropriate increases in activity are outlined below.

[0620] In one embodiment, the signaling pathway assay measures increases or decreases in cytotoxic T cell activity as measured for an example by direct killing of target cells like for an example cancer cells or by cytokine secretion or by proliferation or by changes in expression of activation markers like for an example CD137, CD107a, PD1, etc. An increase in activity indicates immunostimulatory activity. Appropriate increases in activity are outlined below.

[0621] In one embodiment, the signaling pathway assay measures increases or decreases in NK and/or NKT cell activity as measured for an example by direct killing of target cells like for an example cancer cells or by cytokine secretion or by changes in expression of activation markers like for an example CD107a, etc. An increase in activity indicates immunostimulatory activity. Appropriate increases in activity are outlined below.

[0622] In one embodiment, the signaling pathway assay measures increases or decreases in αβ and/or γδ T-cell suppression, as measured for an example by cytokine secretion or by proliferation or by changes in expression of activation markers like for an example CD137, CD107a, PD1, etc. An increase in activity indicates immunostimulatory activity. Appropriate increases in activity are outlined below.

[0623] In one embodiment, the signaling pathway assay measures increases or decreases in pro-inflammatory cytokine secretion as measured for example by ELISA or by Luminex or by Multiplex bead based methods or by intracellular staining and FACS analysis or by Alispot etc. An increase in activity indicates immunostimulatory activity. Appropriate increases in activity are outlined below.

[0624] In one embodiment, the signaling pathway assay measures increases or decreases in IL-2 secretion as measured for example by ELISA or by Luminex or by Multiplex bead based methods or by intracellular staining and FACS analysis or by Alispot etc. An increase in activity indicates immunostimulatory activity. Appropriate increases in activity are outlined below.

[0625] In one embodiment, the signaling pathway assay measures increases or decreases in interferon-γ production as measured for example by ELISA or by Luminex or by Multiplex bead based methods or by intracellular staining and FACS analysis or by Alispot etc. An increase in activity indicates immunostimulatory activity. Appropriate increases in activity are outlined below.

[0626] In one embodiment, the signaling pathway assay measures increases or decreases in Th1 response as measured for an example by cytokine secretion or by changes in expression of activation markers. An increase in activity indicates immunostimulatory activity. Appropriate increases in activity are outlined below.

[0627] In one embodiment, the signaling pathway assay measures increases or decreases in Th2 response as measured for an example by cytokine secretion or by changes in expression of activation markers. An increase in activity indicates immunostimulatory activity. Appropriate increases in activity are outlined below.

[0628] In one embodiment, the signaling pathway assay measures increases or decreases cell number and/or activity of at least one of regulatory T cells (Tregs), as measured for example by flow cytometry or by IHC. A decrease in response indicates immunostimulatory activity. Appropriate decreases are the same as for increases, outlined below.

[0629] In one embodiment, the signaling pathway assay measures increases or decreases in M2 macrophages cell numbers, as measured for example by flow cytometry or by IHC. A decrease in response indicates immunostimulatory activity. Appropriate decreases are the same as for increases, outlined below.

[0630] In one embodiment, the signaling pathway assay measures increases or decreases in M2 macrophage pro-tumorigenic activity, as measured for an example by cytokine secretion or by changes in expression of activation markers. A decrease in response indicates immunostimulatory activity. Appropriate decreases are the same as for increases, outlined below.

[0631] In one embodiment, the signaling pathway assay measures increases or decreases in N2 neutrophils increase, as measured for example by flow cytometry or by IHC. A decrease in response indicates immunostimulatory activity. Appropriate decreases are the same as for increases, outlined below.

[0632] In one embodiment, the signaling pathway assay measures increases or decreases in N2 neutrophils pro-tumorigenic activity, as measured for an example by cytokine secretion or by changes in expression of activation markers. A decrease in response indicates immunostimulatory activity. Appropriate decreases are the same as for increases, outlined below.

[0633] In one embodiment, the signaling pathway assay measures increases or decreases in inhibition of T cell activation, as measured for an example by cytokine secretion or by proliferation or by changes in expression of activation markers like for an example CD137, CD107a, PD1, etc. An increase in activity indicates immunostimulatory activity. Appropriate increases in activity are outlined below.

[0634] In one embodiment, the signaling pathway assay measures increases or decreases in inhibition of CTL activation as measured for an example by direct killing of target cells like for an example cancer cells or by cytokine secretion or by proliferation or by changes in expression of activation markers like for an example CD137, CD107a, PD1, etc. An increase in activity indicates immunostimulatory activity. Appropriate increases in activity are outlined below.

[0635] In one embodiment, the signaling pathway assay measures increases or decreases in αβ and/or γδ T cell exhaustion as measured for an example by changes in expression of activation markers. A decrease in response indicates immunostimulatory activity. Appropriate decreases are the same as for increases, outlined below.

[0636] In one embodiment, the signaling pathway assay measures increases or decreases αβ and/or γδ T cell response as measured for an example by cytokine secretion or by proliferation or by changes in expression of activation markers like for an example CD137, CD107a, PD1, etc. An increase in activity indicates immunostimulatory activity. Appropriate increases in activity are outlined below.

[0637] In one embodiment, the signaling pathway assay measures increases or decreases in stimulation of antigen-specific memory responses as measured for an example by cytokine secretion or by proliferation or by changes in expression of activation markers like for an example CD45RA, CCR7 etc. An increase in activity indicates immunostimulatory activity. Appropriate increases in activity are outlined below.

[0638] In one embodiment, the signaling pathway assay measures increases or decreases in apoptosis or lysis of cancer cells as measured for an example by cytotoxicity assays such as for an example MTT, Cr release, Calcine AM, or by flow cytometry based assays like for an example CFSE dilution or propidium iodide staining etc. An increase in activity indicates immunostimulatory activity. Appropriate increases in activity are outlined below.

[0639] In one embodiment, the signaling pathway assay measures increases or decreases in stimulation of cytotoxic or cytostatic effect on cancer cells. as measured for an example by cytotoxicity assays such as for an example MTT, Cr release, Calcine AM, or by flow cytometry based assays like for an example CFSE dilution or propidium iodide staining etc. An increase in activity indicates immunostimulatory activity. Appropriate increases in activity are outlined below.

[0640] In one embodiment, the signaling pathway assay measures increases or decreases direct killing of cancer cells as measured for an example by cytotoxicity assays such as for an example MTT, Cr release, Calcine AM, or by flow cytometry based assays like for an example CFSE dilution or propidium iodide staining etc. An increase in activity indicates immunostimulatory activity. Appropriate increases in activity are outlined below.

[0641] In one embodiment, the signaling pathway assay measures increases or decreases Th17 activity as measured for an example by cytokine secretion or by proliferation or by changes in expression of activation markers. An increase in activity indicates immunostimulatory activity. Appropriate increases in activity are outlined below.

[0642] In one embodiment, the signaling pathway assay measures increases or decreases in induction of complement dependent cytotoxicity and/or antibody dependent cell-mediated cytotoxicity, as measured for an example by cytotoxicity assays such as for an example MTT, Cr release, Calcine AM, or by flow cytometry based assays like for an example CFSE dilution or propidium iodide staining etc. An increase in activity indicates immunostimulatory activity. Appropriate increases in activity are outlined below.

[0643] In one embodiment, T cell activation is measured for an example by direct killing of target cells like for an example cancer cells or by cytokine secretion or by proliferation or by changes in expression of activation markers like for an example CD137, CD107a, PD1, etc. For T-cells, increases in proliferation, cell surface markers of activation (e.g., CD25, CD69, CD137, PD1), cytotoxicity (ability to kill target cells), and cytokine production (e.g., IL-2, IL-4, IL-6, IFNγ, TNF-a, IL-10, IL-17A) would be indicative of immune modulation that would be consistent with enhanced killing of cancer cells.

[0644] In one embodiment, NK cell activation is measured for example by direct killing of target cells like for an example cancer cells or by cytokine secretion or by changes in expression of activation markers like for an example CD107a, etc. For NK cells, increases in proliferation, cytotoxicity (ability to kill target cells and increases CD107a, granzyme, and perforin expression), cytokine production (e.g., IFNγ and TNF), and cell surface receptor expression (e.g., CD25) would be indicative of immune modulation that would be consistent with enhanced killing of cancer cells.

[0645] In one embodiment, γδ T cell activation is measured for example by cytokine secretion or by proliferation or by changes in expression of activation markers.

[0646] In one embodiment, Th1 cell activation is measured for example by cytokine secretion or by changes in expression of activation markers.

[0647] Appropriate increases in activity or response (or decreases, as appropriate as outlined above), are increases of at least about 5%, 10%, 20%, 30%, 40%, 50%, 60%, 70%, 80%, 90%, 95% or 98 to 99% percent over the signal in either a reference sample or in control samples, for example test samples that do not contain an anti-PVRIG/anti-TIGIT bispecific antibody of the invention.

[0648] Similarly, increases of at least one-, two-, three-, four- or five-fold as compared to reference or control samples show efficacy.

### X. EXAMPLES

### Example 1: Generation and Characterization of an Anti-PVRIG/Anti-TIGIT Bispecific Antibody

### 1. Introduction

[0649] PVRIG and TIGIT are inhibitory immune checkpoint receptors expressed on T cells and Natural Killer cells. Antibody-mediated blockade of the interaction of these receptors with their respective ligands results in enhanced T cell activity. The combination anti-PVRIG and anti-TIGIT antibody therapy results in synergistic or additive effect in in vitro functional assays. Here we generate and characterize an anti-PVRIG/anti-TIGIT bispecific antibody and show that the antibody retains the binding affinity of each arm for the respective target antigen. Furthermore, the PVRIG/TIGIT BsAb is equivalent to the anti-PVRIG and anti-TIGIT antibody combination in T cell based in vitro functional assay.

### 2. Protocols

[0650] Anti-PVRIG/Anti-TIGIT Bispecific Construct Design:

[0651] Representatives of multiple bispecific PVRIG/TIGIT dual inhibitor antibodies were created in three different formats using a combination of “knob into hole” (KIH) Fc engineering and CrossMab, KIH scFv-Fab (“bottle opener”), and “bottle opener” isovolumetric heterodimerization (“IH”) formats based sequences deposited at IMGT (http://www.imgt.org, positions based on Eu numbering; see also FIGS. 42-44). To create fully human bispecific antibodies in the KIH CrossMab format the CPA.9.086 variable heavy chain plus a two-amino acid linker of alanine and serine was fused to the human constant Lambda domain and the CH2 and CH3 domains of human IgG4 containing mutations S241P, S354C, E356D, M358L and T366W. The CPA.9.086 variable light chain domain plus a linker of two serines was fused to the CH1 of human IgG4. The CHA.7.518.1.H4(S241P) variable heavy chain domain was fused to the CH1 domain of human IgG4 and the CH2 and CH3 domains of human IgG4 containing mutations Y349C, E356D, M358L, T366S, L368A and Y407V. The CHA.7.518.1.H4(S241P) variable light chain domain was fused to the human constant Kappa domain. For the KIH “bottle opener” format, the same CHA.7.518.1 heavy chain and light chain constructs from above were used and paired with a single chain variable fragment (scFv) of CPA.9.086 fused to the hinge region of human IgG4 and also containing CH2 and CH3 with the “knob” mutations listed above. The order of heavy chain and light chain was varied in the single chain format (VH-VL or VL-VH) to assess effects on expression and stability. For the isovolumetric heterodimerization bottle opener format, several variable domain combinations were evaluated (CPA.9.086 scFv paired with CHA.7.518.1, CHA.7.518.1 scFv paired with CPA.9.086, CHA.9.547.18 scFv paired with CHA.7.518.4, and CHA.7.518.4 scFv paired with CHA.547.18) scFv containing constructs had the following substitutions in the CH2 and CH3 domains: F234V L235A G236del S267K S357Q S364K. Fab constructs contained the following substitutions: N208D E233P F234V L235A G236del S267K Q295E L368D K370S N384D Q418E N421D. Substitutions E233P F234V L235A G236del S267K and E233P F234V L235A G236del S267K K370S N384D Q418E N421D were incorporated to reduce Fc receptor binding.

[0652] Expression of CHA.7.518.1.H4(S241P)/CPA.9.086 Bispecific Antibody:

[0653] The DNA for each of these constructs was cloned into the pcDNA3.4 expression vector (ThermoFisher) to yield four separate vectors. To express bispecific antibodies, DNA for each construct was transfected into 3 ml logarithmically growing Expi293 cells (ThermoFisher) at a final total concentration of 1 ug/ml. Various ratios of heavy chains and light chains were analyzed for expression yield by LabChip (Perkin Elmer) capillary electrophoresis in both reducing and non-reducing conditions. This allows the relative amount of uncomplexed heavy chain and light chain to be qualitatively determined for multiple conditions. Once the optimal ratios were determined, larger scale productions were performed, and the expressed bispecific antibodies purified

[0654] Purification of CHA.7.518.1.H4(S241P)/CPA.9.086 Bispecific Antibody:

[0655] The anti-PVRIG/anti-TIGIT bispecific antibodies were purified using affinity purification and size-exclusion chromatography.

[0656] Affinity Purification with Protein A:

[0657] Protein A affinity chromatography (ProA) was performed on supernatant to purify bispecific antibody (BsAb) from cell culture supernatant. Supernatant was prepared for chromatography by the addition of 20 mL of 1M Sodium Phosphate pH 7.4 (Teknova) and 100 mL of 5M NaCl (Teknova) per 1000 mL of supernatant followed by 0.22 μm filtration. Separation was performed on an AKTA Pure (GE Healthcare) with a 5 mL HiTrap column of MabSelect SuRe (GE Healthcare) equilibrated with 20 mM Sodium Phosphate pH 7.4, 0.6M NaCl (Teknova). The supernatant was loaded at 1.25 mL/minute. Post load the column was washed with equilibration buffer for 10 CV at 5 mL/min. Elution was done in two steps. Step one was with 20 mM Sodium Citrate pH 3.6, 150 mM NaCl (Teknova) and step 2 was with 100 mM Glycine pH 2.7, 150 mM NaCl (Teknova). Both elutions were carried out over 4.3 CV at 5 mL/min. collecting 12 mL fractions into tube prefilled with 2.25 mL of 1 M Tris pH 7.5 (Teknova). Fractions were analyzed for protein concentration by absorbance at 280 nm using a NanoDrop (Thermo) and monomer content by analytical HPLC-SEC.

[0658] Separation of Monomer and High Molecular Weight (HMW) Components:

[0659] Preparative size exclusion chromatography (SEC) was performed on the Pro A purified bispecific antibody to separate monomer from HMW. BsAb was prepared for SEC chromatography by 0.22 μm filtration. Separation was performed on an AKTA Pure (GE Healthcare) running an isocratic gradient of PBS, pH 7.3 (Teknova). BsAb was loaded on to a Superdex 200 pg 26/600 column (GE Healthcare) at 2.6 mL/min. Elution was with 1 column volume (CV) of PBS at 2.6 mL/min. Fractions were collected after the void volume. HMW eluted ahead of the monomer as expected. Peak fractions were run on HPLC-SEC to determine monomer versus HMW percentage and concentration was determined by absorbance at 280 nm. Monomer and HMW containing fractions were separately pooled.

[0660] Sec-HPLC Analysis:

[0661] Analysis was performed using an Acquity UPLC (Waters) system and a Protein BEH SEC, 200A, 1.7 um, 4.6 mm×150 mm, 10K-450K (Waters) was used as the SEC column. The SEC separation was performed at ambient temperature isocratically using a mobile phase consisting of PBS, pH 7.4 (Teknova). Flow rate was 0.25 mL min-1. The relative amounts of BiSpAb monomer, aggregates and fragments were quantified by calculation of the peak areas detected by the ultraviolet (UV) detectors at 280 nm.

[0662] SPR Kinetic Assay of Human TIGIT and Human PVRIG Binding to the Bispecific Antibody:

[0663] All experiments were performed using a ProteOn XPR 36 instrument at 22° C. while samples were kept at 4° C. during the assay. First, high density capture surfaces were prepared with a goat anti-human Fc polyclonal antibody (Thermo Fisher) immobilized over all vertical capture lanes and horizontal interspots on a GLC chip (Bio Rad) using standard amine coupling. Typical immobilization levels for the polyclonal antibody for each lane were around 4600RU. Human TIGIT-HIS monomer was obtained from Sino Biological, while human PVRIG-HIS was prepared in-house. The bispecific antibody was diluted to ˜1 μg/ml in running buffer, which was 1×PBST with filtered BSA added to a final concentration of 100 μg/ml. For each “single-shot kinetics” cycle on the ProteOn instrument, a different antibody was captured over two unique vertical capture lanes for two minutes. After switching the buffer flow of the ProteOn to the horizontal direction, capture surfaces were stabilized for approximately 15-20 minutes. Over separate capture cycles, six concentrations of a 3-fold dilution series of human TIGIT (362 pM-88 nM) or human PVRIG (460 pM-112 nM) were injected for 2 minutes followed by 15 minutes of dissociation at a flow rate of 100 μl/min. Three replicates of each concentration series of antigen were injected over two independent surfaces of the captured bispecific antibody along with several cycles of buffer injections for double-referencing. Anti-human antibody surfaces were regenerated between each cycle with two 30-second pulses of 146 mM phosphoric acid. The sensorgrams of TIGIT and PVRIG injected over the captured bispecific antibody were processed using a ProteOn version of Scrubber and were fit to a 1:1 kinetic binding model, including a term for mass transport.

[0664] SPR Sandwich Assay of Human TIGIT and Human PVRIG Simultaneously Bound to the Bispecific Antibody:

[0665] Experiments were performed using a Biacore 3000 (GE Healthcare) at 22° C. Human TIGIT (Sino Biologicals) was covalently immobilized to all four flow channels of a CMS Biacore chip at RU levels that ranged from 800RU to 1000RU using standard amine coupling. The bispecific antibody was injected over one flow cell at a molecular concentration of 25 nM for three minutes at a flow rate of 25 μl/min. Human PVRIG was then simultaneously injected at a concentration of 116 nM for three minutes at a flow rate of 25 μl/min over both the TIGIT flow cell complexed with the bispecific antibody and over a control TIGIT surface having no bound bispecific antibody. The control TIGIT surface was reference subtracted using Scrubber 2.0 software to process the resulting sensorgrams.

[0666] Dual Engagement ELISA:

[0667] To prepare ELISA plates for analysis of bispecific antibody binding, plates were coated overnight at 4° C. with 100 ul of 1 ug/mL PVRIG-hFc. in PBS. The following day, the coating solution was discarded, and the plate blocked with 250 μL of 2% BSA, 0.1% Tween 20 for 2 hours. The wells were washed 3× with 300 μL of 1×PBS pH 7.4, 0.05% Tween20 (wash buffer). Samples were serially diluted in 3-fold increments in 1×PBS pH7.4, 0.1% Tween20, 0.2% BSA (binding buffer) from 1 μg/mL to 1.4 pg/mL and incubated at room temperature for 1 hour with shaking at 300 RPM. As controls, CHA.7.518.1.H4(S241P), a PVRIG-specific antibody, and CPA.9.086, a TIGIT-specific antibody, were similarly prepared and evaluated as the bispecific samples. Wells were washed as above and the ability to bind TIGIT was assessed by the addition of 100 μL of 1 μg/mL TIGIT-His (Sino Biological cat #10917-H08H). For assessing the control antibody binding, 100 μL of 1 μg/mL PVRIG-His (Compugen, lot 20170623) was added to the CHA.7.518.1.H4(S241P) wells and 100 ul of 1 μg/mL TIGIT-His added to the CPA.9.086 wells. Incubation with soluble ligands was for 1 hour at room temperature with shaking at 300 RPM. Wells were washed as above, and then soluble ligand binding was detected by the addition of 100 ul of 1 ug/ml anti-His-Tag antibody HRP conjugate (R&D Systems, Catalog # MAB050H, clone# AD1.1.10 in binding buffer and incubated at room temperature with shaking at 300 RPM for 1 hour. Wells were washed 3× with wash buffer as above and 100 μL of room temperature Ultra-TMB substrate (Moss Inc.) added. Development was for 7 minutes and the reaction stopped by the addition of 100 μL 2N H2504. The plate was read on Molecular Devices SpectraMax 340PC-384 plate reader set at wavelength of 450 nM.

[0668] To assess TIGIT-capture and soluble PVRIG binding of the bispecific antibodies, as similar assay to that used above was performed. In this case, 100 μL/well of 1 μg/ml TIGIT-Fc fusion protein in 1×PBS pH7.4 was coated overnight at 4° C. The coating solution was discarded, and the wells blocked with 1×PBS pH 7.4, 2% BSA and 0.1% Tween 20 for 2 hours at room temperature. Bispecific and monospecific controls used above were serially diluted in the same range as for the PVRIG capture experiment. The remainder of the experiment was the same as above with the exception that PVRIG-His was used for detection of all samples except CPA.9.086 for which TIGIT-His was used.

[0669] Human CMV-Specific CD8⁺ T Cell Expansion:

[0670] Human CMV-reactive peripheral blood mononuclear cells (PBMCs) (CTL) were thawed, resuspended at 2×10⁶ cells/ml, and stimulated with 1 μg/ml of the CMV pp65 peptide (Anaspec) in complete RPMI medium supplemented with 2 ng/ml recombinant human IL-2 (R&D systems) and 10 ng/ml recombinant human IL-7 (R&D systems) at 37° C. with 5% CO2. After 6 days, cells were split 1:2 and rested with low dose human IL-2 (100 IU/ml). At day eight, cells were harvested, and re-plated in low dose IL-2 (100 U/ml) at 2 million/ml in complete RPMI media for two days. At day eleven, cells are phenotyped for CD8⁺ T cell purity and CMV pp65₍₄₉₅₋₅₀₃₎ reactivity.

[0671] Cells were stained with anti-CD3 (clone: OKT3)-allophycocyanin seven (APC-Cy7; Biolegend), anti-CD8 (clone: H1T8a)-Alexa Fluor (AF) 488 (Biolegend), a combined cocktail of anti-CD14 (clone: HCD14)-peridinin chlorophyll protein (PerCP-Cy5.5), anti-CD19 (clone:HIBCD14) PerCP-Cy5.5, anti-CD56 (clone:HCD56)-PerCP-Cy5.5(Biolegend), anti-TIGIT (clone: MB SA43)-allophycocyanin (APC; e-Bioscience) or IgG4 (Compugen)-isotype control (APC:Biolegend), CHA.7.518.1.H4(S241P)-AF-647 (Compugen) or IgG4-AF647 isotype control (Compugen), and anti-PD-1 (clone: EH12.2H7)-Brilliant Violet 421 (BV421:Biolegend) or IgG1 (clone: MOPC21) BV421 (Biolegend). To assess the frequency of tetramer-reactive CD8⁺ T cells, PBMCs were stained with iTAg Tetramer-HLA-A*02:01 CMV pp65₍₄₉₅₋₅₀₃₎ (NLVPMVATV)-phycoerythrin (MBL-BION) for 30 min at room temperature. Cells were washed with PBS/1% BSA/0.01% sodium azide buffer, data were acquired using a Fortessa flow cytometer (BD Biosciences) and analyzed using FlowJo (Treestar).

[0672] Human CMV-Specific CD8⁺ T cell Co-Culture Assay with pp65-Expressing Melanoma Cell Lines:

[0673] An in vitro co-culture assay with human CMV-specific CD8⁺ T cells was utilized to assess the effect of monoclonal antibodies (mAbs) to PVRIG or TIGIT and a bispecific antibody (BsAb) to PVRIG and TIGIT on antigen-specific cytokine secretion. The target cells used in the co-culture assay was a modified Mel-624 cell line (ATCC), Mel-624 pp65. This cell line was generated by ectopically expressing the CMV protein, pp65. This results in HLA-A2 presentation of the peptides derived from pp65 without the need to add exogenous pp65 peptides. A dose-dependent titration of inhibitory receptor blockade on CMV pp65 reactive CD8 T cells in co-culture with Mel-624 pp65 cancer cell line was performed. A 10 point, 4-fold dilution series of antibody, starting at 132 nM and ending at 0.001 nM was co-cultured with Me1624 pp65 cells and CMV⁺CD8⁺ T cells in a 5:1 ratio of target cells (75,000) to T cells (15,000). T cells, tumor cell lines, and antibodies were added together in a 96-well U-bottom plate (Costar), and incubated for 18 hours at 37° C. The following antibodies were tested: anti-PVRIG (CHA.7.518.1.H4(S241P)), anti-TIGIT (CPA.9.086), a combination of CHA.7.518.1.H4(S241P) and CPA.9.086, bispecific antibodies (CHA.7.518.1.H4(S241P) or CHA.7.518.4/CPA.9.086 or CHA.9.547.18 BsAb) that targets both PVRIG and TIGIT, and a human IgG4 isotype control. After the 18 hours incubation period, the amount of human interferon gamma (IFN-γ) in the co-culture supernatant was measured by flow cytometry using a cytometric bead assay (BD). Data were analyzed by non-linear regression and fit to either a “One site specific binding” or “One site—Total and nonspecific binding” model using GraphPad Prism.

[0674] Differential Scanning Fluorimetry:

[0675] Melting temperature provides a measure of antibody stability. The bispecific and control monospecific antibodies were analyzed for melting temperature denaturation and binding of the hydrophobic dye SYPRO Orange (Thermo). Antibodies were diluted to an appropriate concentration in the desired buffer with SYPRO Orange. A StepOne Plus RT-PCR instrument (Applied Biosystems) was used to perform a controlled melt (25 C-95 C, 1 degree/minute ramp) and detect fluorescence of SYPRO Orange at 1-minute intervals. The antibodies were analyzed at pH6.0 and pH7.4 to ensure that the effects obaserved were not due to the formulation.

[0676] LC-MS Analysis:

[0677] Mass spectrometry was performed by LakePharma Inc. in Belmont, Calif., USA. After enzymatic deglycosylation, samples were analyzed on an Agilent Q Exactive Orbitrap (Thermo Fisher Scientific) coupled to a capillary UHPLC system. Intact analysis was performed under nonreduced and reduced conditions for protein characterization and Waters MassLynx software used to analyze the results.

[0678] Freeze-Thaw Stability Analysis:

[0679] Samples were prepared by adjusting the concentration to 1.0 mg/mL in 1×PBS, pH7.4 by dilution or using a spin concentrator. 100 ul was put into 0.2 ml snapstrip PCR tubes and frozen at −80° C. for at least 24 hours, then thawed at room temperature. This cycle was repeated twice for 3 cycles of freezing and thawing. 20 ul of each sample was analyzed by SEC-UPLC for monomer, high molecular weight (HMW) and low molecular weight (LMW) species. The samples were also run in CE-SDS (reduced and non-reduced, Lab Chip GXII, Perkin Elmer) and concentration assessed after centrifugation to remove any precipitated protein.

[0680] Low pH Hold:

[0681] Samples were prepared by adjusting the concentration to 1.0 mg/mL in 1×PBS, pH7.4 by dilution or using a spin concentrator. The pH of each sample was adjusted to pH3.0 by addition of 0.1 M Glycine pH3.2 and incubated at room temperature for 0, 1, 2, 4, and 24 hours. The samples were neutralized with 1 M Tris pH7.5 and analyzed by CE-SDS (reduced and non-reduced, Lab Chip GXII, Perkin Elmer), SEC-UPLC and absorbance at 280 nm by NanoDrop after centrifugation to remove any precipitated protein.

### Results

[0682] Sequence of Bispecific Antibodies:

[0683] The anti-PVRIG/anti-TIGIT bispecific antibodies were created using two different Fc heterodimerization formats and two variable domain display formats. The sequence of each fragment is shown in FIGS. 26A-26B, 40A-40T and 41A-41T.

[0684] SPR Kinetic Assay:

[0685] FIG. 27 shows the sensorgram data of (A) TIGIT and (B) PVRIG binding to the captured bispecific antibody over two independent surfaces and the global fits of the data to a simple 1:1 kinetic model. Because there was not enough dissociation signal decay for the kinetic model to adequately estimate the off-rate for the TIGIT-bispecific antibody interaction, the k_{d} value was arbitrarily held constant at 1.0e⁻⁵ sec⁻¹ in order to fit the data. The affinity and rate constants from the TIGIT-bispecific antibody interaction in FIG. 27 should therefore only be considered to be rough estimates. The binding constants of the TIGIT-Bispecific antibody interaction as measured using SPR with the k_{d} held constant at 1.0e⁻⁵ sec⁻⁴ were kₐ=3.9e⁶ M⁻¹ sec⁻¹ and K_{D}=2.6 pM. The binding constants for the PVRIG-Bispecific antibody interaction were estimated to be kₐ=1.3e⁶ M⁻¹ sec⁻¹, k_{d}=2.4e⁻⁴ sec⁻¹, and K_{D}=187 pM.

[0686] SPR Sandwich Assay:

[0687] FIG. 28 shows the sensorgram of successive injections of the bispecific antibody (A) injected over the Biacore chip having immobilized human TIGIT followed by an injection of human PVRIG (B), therefore showing the ability of the bispecific antibody to simultaneously bind both human TIGIT and human PVRIG. The response level of the bispecific antibody binding to the TIGIT surface was ˜1100RU. The response level of human PVRIG binding to the bispecific antibody pre-complexed to the TIGIT surface was ˜230RU.

[0688] CMVpp65 Reactive T Cells Express PVRIG, TIGIT, and PD-1:

[0689] CD8⁺ T cells specific to a CMV protein, pp65, have been well characterized and these CMV specific T cells can be used to study the role of modulatory receptors on T cells. Stimulation of HLA-A2⁺ donor PBMCs using CMV pp65 peptide, IL-2 and IL-7 resulted in a strong expansion of CMV pp65-specific T cells to purities ranging from 90-95% as determined by tetramer staining. FIG. 29A shows the percentage of CMV pp65 specific T cells from two donors after expansion. The surface expression of PVRIG, TIGIT and PD-1 on T cells was assessed from these donors. On day eleven of activation, CMV pp65 specific T cells expressed PVRIG gMFI ratio (MFIr, defined as the MFI of target antibody divided by MFI of control antibody): 3-5-fold, TIGIT MFIr: 4-fold), and PD-1 MFIr: 1-2-fold (FIG. 29B).

[0690] Anti-Human PVRIG and TIGIT Antibodies Increase IFN-γ Secretion Either Alone or in Combination from Human CMV-Specific T Cells:

[0691] With the rationale that the induction of TIGIT and PVRIG expression on CD8⁺ T cells correlates with T cell dysfunction, we aimed to evaluate the effects of PVRIG and TIGIT blockade on the capacity for pro-inflammatory cytokine production. CMV reactive T cells from 2 donors (Donor 4 and Donor 72) were co-cultured with Mel-624 (PVR⁺PVRL2⁺) pp65 cells. The activity of CHA.7.518.1.H4(S241P), CPA.9.086, CHA.7.518.1.H4(S241P) and CPA.9.086, and CHA.7.518.1.H4(S241P)/CPA.9.086 BsAb on CMV⁺CD8⁺ T cells was assessed. We observed that CHA.7.518.1.H4(S241P) increased IFN-γ production (32-46%) as compared with IgG control antibody. Addition of CPA.9.086 antibody resulted in a further increase in IFN-γ (55-86%). When combined, CHA.7.518.1.H4(S241P) and CPA.9.086 treatment synergistically or in some cases, additively increased cytokine production of CD8⁺ T cells compared with CHA.7.518.1.H4(S241P) or CPA.9.086 single blockade (99-189%). The CHA.7.518.1.H4(S241P)/CPA.9.086 BsAb exhibited the same functional effect as the combination CHA.7.518.1.H4(S241P) and CPA.9.086 2 mAbs (100-191%). The percent increase of IFN-γ secretion in each antibody over respective isotype control antibodies is shown in FIG. 30.

[0692] It was also observed that the CHA.7.518.1.H4(S241P)/CPA.9.086 BsAb displayed a dose dependent increase in IFN-γ production by CMV pp65 specific T cells which is comparable to the combination of CHA.7.518.1.H4(S241P) and CPA.9.086 mAbs (FIG. 31A-31B). In both donors 4 and 72, the average±SEM IFN-γ production EC₅₀ values for the CHA.7.518.1.H4(S241P)/CPA.9.086 BsAb and the combination of CHA.7.518.1.H4(S241P) and CPA.9.086 were similar and calculated to be in the low single digit nM range. In donor 4, the EC₅₀ was calculated to be 0.38 nM for the combination of CHA.7.518.1.H4(S241P) and CPA.9.086, whilst the CHA.7.518.1.H4(S241P)/CPA.9.086 BsAb EC₅₀ was calculated to be 0.36 nM. In donor 72, the EC₅₀ was calculated to be 0.58 nM for the combination of CHA.7.518.1.H4(S241P) and CPA.9.086, whilst the CHA.7.518.1.H4(S241P)/CPA.9.086BsAb EC₅₀ was calculated to be 0.53 nM (FIG. 31A-31B).

[0693] Dual Engagement ELISA:

[0694] Bispecific and monospecific antibodies were assessed for the ability to bind coated antigen and then bind a second, soluble ligand simultaneously. FIG. 49 shows the binding of 3-fold serial dilutions of bispecific and monospecific antibodies to PVRIG coated plates with detection through the binding of biotinylated TIGIT-His protein and Streptavidin-HRP. Similarly, FIG. 50 shows binding of 3-fold serial dilutions of bispecific and monospecific antibodies to recombinant TIGIT-His coated plates and detection through binding of biotinylated PVRIG and Streptavidin HRP. All bispecific formats were able to engage both ligands simultaneously. Apparent shifts in affinity was due to the relative amount of correctly assembled antibody in solution. FIG. 51 shows the EC₅₀s calculated using SoftMax Pro software (Molecular Devices) and corrected for correctly assembled bispecific antibody as determined by LC-MS and shown in FIG. 45.

[0695] Differential Scanning Fluorimetry:

[0696] The bispecific and monospecific antibodies were analyzed for melting temperature denaturation and binding of the hydrophobic dye SYPRO Orange (Thermo). The antibodies were analyzed at pH6.0 and pH7.4 to ensure that the effects observed were not due to the formulation. Tm1 which reflects the dissolving of the CH2 domain was in the range of 51.7 C to 60.4 C at pH7.4 and 50.9 C to 60.5 C at pH6.0 for all the bispecific antibodies (FIG. 52). The monospecific antibodies all demonstrated a higher Tm1, 63.3 C to 66.2 C at pH7.4 and 62.4 C to 64.1 C at pH6.0. Tm2 for all the antibodies (CH3 and Fab melting) were >70 C (range=70.2 C-77.1 C at pH7.4 and 70.9 C to 77.1 C at pH6.0).

[0697] LC-MS Analysis:

[0698] Deglycosyated intact mass spectrometry was performed on the bispecific antibodies of all three formats. Heterodimerization utilizing knobs into holes Fc and CrossMab strategies resulted in 32% and 73% correctly assembled bispecific antibody, while the two “bottle opener” formats containing a scFv containing arm and an intact antibody arm through different Fc heterodimerization approaches (knobs into holes and isovolumetric heterodimerization, respectively) resulted in >95% correctly assembled bispecific antibody (FIG. 45).

[0699] Low pH Hold:

[0700] Bispecific and monospecific control antibodies were incubated at pH3 for 0, 1, 2, 4, and 24 hours and assessed for the formation of aggregates or lower molecular weight products by CE-SDS using a LabChip GXII (Perkin Elmer) and SEC-UPLC as observed by changes to the % monomer content from T=0. All bispecific and monospecific antibodies were stable to this stress, showing at most a 6% change in monomer content over the 24 hour time course.

[0701] Freeze-Thaw Stability Analysis:

[0702] Bispecific and control monospecific antibodies utilizing the various light chain constraining and heterodimerization approaches were assessed for their ability to withstand serial freeze thaw cycles. After three cycles of freezing and thawing, the antibodies were analyzed by SEC-UPLC for changes in the Low Molecular Weight (LMW), Monomer, and High Molecular Weight species present in solution. Positive values represent an increase in the relative proportion of the species reported after the freeze/thaw cycles. Bispecific antibody BsAb-14 was the only sample that showed a >5% decrease in monomer content from T=0 (FIG. 53A-53D). All other formats were stable after this stress. CMV assay dose response

[0703] Bispecific, monospecific and combinations of monospecific antibodies were tested in the CMV assay described for FIG. 30 in a dose response. Serial three-fold dilutions of each antibody or mixture were performed to provide a range of antibody concentrations from 66 nM to 0.003 nM. Monospecific antibodies were mixed 1:1 with a non-specific control antibody prior to serial dilution. The bispecific antibodies tested were BsAb 2 (KIH+CrossMab), BsAb 4 (KIH bottle opener), BsAb 14, and BsAb 18 (both IH bottle opener). Combinations of CHA.7.518.1 and CHA.7.518.4 with CPA.9.086 were also assessed. The bispecific antibodies all performed at least equally to the combination of antibodies across all the formats tested and were superior to the monospecific antibodies in all three donor T-cells tested in two independent assays (FIG. 54A-54B).

### SUMMARY AND CONCLUSIONS

[0704] Addition of CHA.7.518.1.H4(S241P) and CPA.9.086, either alone or in combination, and the CHA.7.518.1.H4(S241P)/CPA.9.086 BsAb to the Mel-624 pp65 assay induced a dose dependent increase in IFN-γ secretion compared with IgG control antibody. When combined, CHA.7.518.1.H4(S241P) and CPA.9.086 synergistically or in the case of donor 72, additively increased cytokine production of CD8⁺ T cells compared to single blockade alone. The CHA.7.518.1.H4(S241P)/CPA.9.086 BsAb exhibited the same functional effect as the combination of CHA.7.518.1.H4(S241P)/CPA.9.086 mAbs with EC₅₀ values for both donors calculated to be in the low single digit nM range. Taken together, these data demonstrate that CHA.7.518.1.H4(S241P) and CPA.9.086 antibodies, either alone or in combination, or in a bispecific antibody format can enhance T cell effector function.

### Example 2: ELISA Assay

### PVRIG Coated Plate

[0705] To prepare ELISA plates for analysis of bispecific antibody binding, plates were coated overnight at 4° C. with 100 ul of 1 ug/mL PVRIG-hFc. in PBS. The following day, the coating solution was discarded, and the plate blocked with 250 μL of 2% BSA, 0.1% Tween 20 for 2 hours. The wells were washed 3× with 300 μL of 1×PBS pH 7.4, 0.05% Tween20 (wash buffer). Samples were serially diluted in 3-fold increments in 1×PBS pH7.4, 0.1% Tween20, 0.2% BSA (binding buffer) from 1 μg/mL to 1.4 pg/mL and incubated at room temperature for 1 hour with shaking at 300 RPM. As controls, CHA.7.518.1 H4, a PVRIG-specific antibody, and CPA.9.086 H4, a TIGIT-specific antibody, were similarly prepared and evaluated as the bispecific samples. Wells were washed as above and the ability to bind TIGIT was assessed by the addition of 100 μL of 1 μg/mL TIGIT-His (Sino Biological cat #10917-H08H). For assessing the control antibody binding, 100 μL of 1 μg/mL PVRIG-His (Compugen, lot 20170623) was added to the CHA.7.518.1 H4 wells and 100 ul of 1 μg/mL TIGIT-His added to the CPA.9.086 H4 wells. Incubation with soluble ligands was for 1 hour at room temperature with shaking at 300 RPM. Wells were washed as above, and then soluble ligand binding was detected by the addition of 100 ul of 1 ug/ml anti-His-Tag antibody HRP conjugate (R&D Systems, Catalog # MAB050H, clone# AD1.1.10) in binding buffer and incubated at room temperature with shaking at 300 RPM for 1 hour. Wells were washed 3× with wash buffer as above and 100 μL of room temperature Ultra-TMB substrate (Moss Inc.) added. Development was for 7 minutes and the reaction stopped by the addition of 100 μL 2N H2504. The plate was read on Molecular Devices SpectraMax 340PC-384 plate reader set at wavelength of 450 nM.

[0706] To assess TIGIT-capture and soluble PVRIG binding of the bispecific antibodies, as similar assay to that used above was performed. In this case, 100 μL/well of 1 μg/ml TIGIT-Fc fusion protein in 1×PBS pH7.4 was coated overnight at 4° C. The coating solution was discarded, and the wells blocked with 1×PBS pH 7.4, 2% BSA and 0.1% Tween 20 for 2 hours at room temperature. Bispecific and monospecific controls used above were serially diluted in the same range as for the PVRIG capture experiment. The remainder of the experiment was the same as above with the exception that PVRIG-His was used for detection of all samples except CPA.9.086 H4 for which TIGIT-His was used.

[0707] The examples set forth above are provided to give those of ordinary skill in the art a complete disclosure and description of how to make and use the embodiments of the compositions, systems and methods of the invention, and are not intended to limit the scope of what the inventors regard as their invention. Modifications of the above-described modes for carrying out the invention that are obvious to persons of skill in the art are intended to be within the scope of the following claims. All patents and publications mentioned in the specification are indicative of the levels of skill of those skilled in the art to which the invention pertains.

[0708] All headings and section designations are used for clarity and reference purposes only and are not to be considered limiting in any way. For example, those of skill in the art will appreciate the usefulness of combining various aspects from different headings and sections as appropriate according to the spirit and scope of the invention described herein.

[0709] All references cited herein are hereby incorporated by reference herein in their entireties and for all purposes to the same extent as if each individual publication or patent or patent application was specifically and individually indicated to be incorporated by reference in its entirety for all purposes.

[0710] Many modifications and variations of this application can be made without departing from its spirit and scope, as will be apparent to those skilled in the art. The specific embodiments and examples described herein are offered by way of example only, and the application is to be limited only by the terms of the appended claims, along with the full scope of equivalents to which the claims are entitled.

1. An anti-PVRIG/anti-TIGIT bispecific antibody that monovalently binds a human PVRIG and monovalently binds TIGIT for use in activating T cells and/or NK cells for the treatment of cancer.

2. An anti-PVRIG/anti-TIGIT bispecific antibody comprising:
a) a first antigen binding portion comprising:
i. a first heavy chain variable domain comprising a vhCDR1, vhCDR2, and vhCDR3 from an anti-PVRIG antibody; and
ii. a first light chain variable domain comprising a vlCDR1, vlCDR2, and vlCDR3 from an anti-PVRIG antibody;
wherein the anti-PVRIG antibody is selected from the group consisting of CHA.7.518.4, CHA.7.518.1, CHA.7.518, CHA.7.524 CHA.7.530, CHA.7.538_1, CHA.7.538_2, CHA.7.502, CHA.7.503, CHA.7.506, CHA.7.508, CHA.7.510, CHA.7.512, CHA.7.514, CHA.7.516, CHA.7.518, CHA.7.520.1, CHA.7.520.2, CHA.7.522, CHA.7.524, CHA.7.526, CHA.7.527, CHA.7.528, CHA.7.530, CHA.7.534, CHA.7.535, CHA.7.537, CHA.7.538.1, CHA.7.538.2, CHA.7.543, CHA.7.544, CHA.7.545, CHA.7.546, CHA.7.547, CHA.7.548, CHA.7.549, CHA.7.550, CHA7.538.1.2, CPA.7.021, CPA.7.001, CPA.7.003, CPA.7.004, CPA.7.006, CPA.7.008, CPA.7.009, CPA.7.010, CPA.7.011, CPA.7.012, CPA.7.013, CPA.7.014, CPA.7.015, CPA.7.017, CPA.7.018, CPA.7.019, CPA.7.022, CPA.7.023, CPA.7.024, CPA.7.033, CPA.7.034, CPA.7.036, CPA.7.040, CPA.7.046, CPA.7.047, CPA.7.049, CPA.7.050, and CHA.7.518; and
a) a second antigen binding portion comprising an anti-TIGIT antigen binding domain.

3. An anti-PVRIG/anti-TIGIT bispecific antibody comprising:
a) a first antigen binding portion comprising an anti-PVRIG antigen binding domain; and
b) a second antigen binding portion comprising:
i. a second heavy chain variable domain comprising a vhCDR1, vhCDR2, and vhCDR3 from an anti-TIGIT antibody; and
ii. a second light chain variable domain comprising a vlCDR1, vlCDR2, and vlCDR3 from an anti-TIGIT antibody;
wherein the anti-TIGIT antibody is selected from the group consisting of CPA.9.086, CHA.9.547.18, CPA.9.018, CPA.9.027, CPA.9.049, CPA.9.057, CPA.9.059, CPA.9.083, CPA.9.089, CPA.9.093, CPA.9.101, CPA.9.103, CHA.9.536.1, CHA.9.536.3, CHA.9.536.4, CHA.9.536.5, CHA.9.536.6, CHA.9.536.7, CHA.9.536.8, CHA.9.560.1, CHA.9.560.3, CHA.9.560.4, CHA.9.560.5, CHA.9.560.6, CHA.9.560.7, CHA.9.560.8, CHA.9.546.1, CHA.9.547.1, CHA.9.547.2, CHA.9.547.3, CHA.9.547.4, CHA.9.547.6, CHA.9.547.7, CHA.9.547.8, CHA.9.547.9, CHA.9.547.13, CHA.9.541.1, CHA.9.541.3, CHA.9.541.4, CHA.9.541.5, CHA.9.541.6, CHA.9.541.7, and CHA.9.541.8.

4. An anti-PVRIG/anti-TIGIT bispecific antibody comprising:
a) a first antigen binding portion comprising:
i. a first heavy chain variable domain comprising a vhCDR1, vhCDR2, and vhCDR3 from an anti-PVRIG antibody; and
ii. a first light chain variable domain comprising a vlCDR1, vlCDR2, and vlCDR3 from an anti-PVRIG antibody
wherein the anti-PVRIG antibody is selected from the group consisting of CHA.7.518.4, CHA.7.518.1, CHA.7.518, CHA.7.524, CHA.7.530, CHA.7.538_1, CHA.7.538_2, CHA.7.502, CHA.7.503, CHA.7.506, CHA.7.508, CHA.7.510, CHA.7.512, CHA.7.514, CHA.7.516, CHA.7.518, CHA.7.520.1, CHA.7.520.2, CHA.7.522, CHA.7.524, CHA.7.526, CHA.7.527, CHA.7.528, CHA.7.530, CHA.7.534, CHA.7.535, CHA.7.537, CHA.7.538.1, CHA.7.538.2, CHA.7.543, CHA.7.544, CHA.7.545, CHA.7.546, CHA.7.547, CHA.7.548, CHA.7.549, CHA.7.550, CHA7.538.1.2, CPA.7.021, CPA.7.001, CPA.7.003, CPA.7.004, CPA.7.006, CPA.7.008, CPA.7.009, CPA.7.010, CPA.7.011, CPA.7.012, CPA.7.013, CPA.7.014, CPA.7.015, CPA.7.017, CPA.7.018, CPA.7.019, CPA.7.022, CPA.7.023, CPA.7.024, CPA.7.033, CPA.7.034, CPA.7.036, CPA.7.040, CPA.7.046, CPA.7.047, CPA.7.049, and CPA.7.050CHA.7.518; and
b) a second antigen binding portion comprising:
i. a second heavy chain variable domain comprising a vhCDR1, vhCDR2, and vhCDR3 from an anti-TIGIT antibody; and
ii. a second light chain variable domain comprising a vlCDR1, vlCDR2, and vlCDR3 from an anti-TIGIT antibody;
wherein the anti-TIGIT antibody is selected from the group consisting of CPA.9.086, CHA.9.547.18, CPA.9.018, CPA.9.027, CPA.9.049, CPA.9.057, CPA.9.059, CPA.9.083, CPA.9.086, CPA.9.089, CPA.9.093, CPA.9.101, CPA.9.103, CHA.9.536.1, CHA.9.536.3, CHA.9.536.4, CHA.9.536.5, CHA.9.536.6, CHA.9.536.7, CHA.9.536.8, CHA.9.560.1, CHA.9.560.3, CHA.9.560.4, CHA.9.560.5, CHA.9.560.6, CHA.9.560.7, CHA.9.560.8, CHA.9.546.1, CHA.9.547.1, CHA.9.547.2, CHA.9.547.3, CHA.9.547.4, CHA.9.547.6, CHA.9.547.7, CHA.9.547.8, CHA.9.547.9, CHA.9.547.13, CHA.9.541.1, CHA.9.541.3, CHA.9.541.4, CHA.9.541.5, CHA.9.541.6, CHA.9.541.7, and CHA.9.541.8.

5. The anti-PVRIG/anti-TIGIT bispecific antibody of claim 4, wherein first antigen binding portion comprises:
i. a first heavy chain comprising VH-CH1-hinge-CH2-CH3; and
ii. a first light chain comprising VL-CL, wherein the CL is the constant domain of either a kappa or lambda antibody.

6. The anti-PVRIG/anti-TIGIT bispecific antibody of claim 5, wherein the first heavy chain CH3 comprises the amino acid substitutions S354C, E356D, M358L, and T366W.

7. The anti-PVRIG/anti-TIGIT bispecific antibody of claim 5, wherein the CL is kappa.

8. The anti-PVRIG/anti-TIGIT bispecific antibody of claim 4, wherein the second antigen binding portion comprises:
i. a second heavy chain comprising HC-CL-hinge-CH2-CH3, wherein the CL is either kappa or lambda; and
ii. a second light chain comprising VL-CH1.

9. The anti-PVRIG/anti-TIGIT bispecific antibody of claim 8, wherein the second heavy chain CH3 comprises the amino acid substitutions Y349C, E356D, M358L, T366S, L368A, and Y407V.

10. The anti-PVRIG/anti-TIGIT bispecific antibody of claim 8, wherein the CL is lambda.

11. The anti-PVRIG/anti-TIGIT bispecific antibody of claim 8, wherein the CL is kappa.

12. An anti-PVRIG/anti-TIGIT bispecific antibody comprising:
a) a first antigen binding portion comprising an anti-PVRIG antigen binding domain; and
b) a second anti-TIGIT antigen binding portion comprising:
i. a second heavy chain variable region comprising
CPA.9.086 VH
(EVQLVETGGGLIQPGRSLRLSCAASGFTFSSYAMHWVRQAPGKG
LEWVAVISYAGEVKYYADSVKGRFTISRDNSKNTLYLQMNSLRAE
DTAVYYCARDPLPLHYYGMDVWGQGTTVTVSS; SEQ ID
NO: 1634);
and
ii. a second light chain variable region
comprising CPA.9.086 VL
(QSALTQPRSASGNPGQRVTISCSGSSSNMGRRPVNWYQQIPGTAP
KLLIYSQNQRPSGVPDRFSGSQSGTSASLTISGLQSEDEAEYFCAV
WDDIGRVLQLGGGTQLAVL; SEQ ID NO: 1639).

13. An anti-PVRIG/anti-TIGIT bispecific antibody comprising:
c) a first antigen binding portion comprising an anti-PVRIG antigen binding domain; and
d) a second anti-TIGIT antigen binding portion comprising:
i. a second heavy chain variable region comprising
CPA.9.547.18 VH
(EVQLVESGGGLVQPGGSLRLSCAASGFTFSSYIMSWVRQAPGKGL
EWVATISGGSKGQYYADSVKGRFTISRDNSKNTLYLQMNSLRAED
TAVYYCAKWLLSYYAMDYWGQGTLVTVSS; SEQ ID NO: 1664);
and
ii. a second light chain variable region
comprising CPA.9.547.18 VL
(DIQMTQSPSSLSASVGDRITITCRASQSMAIWLSWYQQKPGKAPK
LLIYKASKSHTGVPSRFSGSGSGTDFTLTISSLQPEDFATYYCQQGQ
SYPYTFGQGTKLEIK; SEQ ID NO: 1668).

14. An anti-PVRIG/anti-TIGIT bispecific antibody comprising:
a) a first antigen binding portion comprising an anti-PVRIG binding doming comprising:
i. a first heavy chain variable region comprising
CHA.7.518.1 VH
(QVQLVQSGAEVKKPGASVKVSCKASGYTFTDYNINWVRQAPGQ
GLEWMGYIYPYIGGSGYAQKFQGRVTMTRDTSTSTVYMELSSLRS
EDTAVYYCAREDKTARNAMDYWGQGTLVTVSS; SEQ ID
NO: 1539);
and
ii. a first light chain comprising CHA.7.518.1 VL
(DIQMTQSPSSLSASVGDRVTITCRVSENIYSNLAWYQQKPGKAPK
LLIYEATNLAEGVPSRFSGSGSGTDFTLTISSLQPEDFATYYCQHFW
GTPYTFGQGTKLEIK; SEQ ID NO: 1544);
and
b) a second antigen binding portion comprising an anti-TIGIT antigen binding domain.

15. An anti-PVRIG/anti-TIGIT bispecific antibody comprising:
a) a first antigen binding portion comprising an anti-PVRIG binding doming comprising:
i. a first heavy chain variable region comprising
CHA.7.518.4 VH
(QVQLVQSGAEVKKPGASVKVSCKASGYTFTDYNINWVRQAPGQ
GLEWMGYIYPYIGGSGYAQKFQGRVTMTRDTSTSTVYMELSSLRS
EDTAVYYCAREDKTARNAMDYWGQGTLVTVSS; SEQ ID
NO: 3179);
and
ii. a first light chain comprising CHA.7.518.4 VL
(DIQMTQSPSSLSASVGDRVTITCRVSENIYDVLAWYQQKPGKAPK
LLIYEATNLAEGVPSRFSGSGSGTDFTLTISSLQPEDFATYYCQHFW
GTPYTFGQGTKLEIK; SEQ ID NO: 3180);
and
b) a second antigen binding portion comprising an anti-TIGIT antigen binding domain.

16. An anti-PVRIG/anti-TIGIT bispecific antibody comprising:
a) a first antigen binding portion comprising an anti-PVRIG binding doming comprising:
i. a first heavy chain variable region comprising
CHA.7.518.1 VH
(QVQLVQSGAEVKKPGASVKVSCKASGYTFTDYNINWVRQAPGQ
GLEWMGYIYPYIGGSGYAQKFQGRVTMTRDTSTSTVYMELSSLRS
EDTAVYYCAREDKTARNAMDYWGQGTLVTVSS; SEQ ID
NO: 1539);
and
ii. a first light chain variable region comprising
CHA.7.518.1
(DIQMTQSPSSLSASVGDRVTITCRVSENIYSNLAWYQQKPGKAPK
LLIYEATNLAEGVPSRFSGSGSGTDFTLTISSLQPEDFATYYCQHFW
GTPYTFGQGTKLEIK; SEQ ID NO: 1544);
and
b) a second antigen binding portion comprising an anti-TIGIT binding doming comprising
i. a first heavy chain variable region comprising
CPA.9.086 VH
(EVQLVETGGGLIQPGRSLRLSCAASGFTFSSYAMHWVRQAPGKG
LEWVAVISYAGEVKYYADSVKGRFTISRDNSKNTLYLQMNSLRAE
DTAVYYCARDPLPLHYYGMDVWGQGTTVTVSS; SEQ ID
NO: 1634);
and
ii. a first light chain variable region comprising
CPA.9.086 VL
(QSALTQPRSASGNPGQRVTISCSGSSSNMGRRPVNWYQQIPGTAP
KLLIYSQNQRPSGVPDRFSGSQSGTSASLTISGLQSEDEAEYFCAV
WDDIGRVLQLGGGTQLAVL; SEQ ID NO: 1639).

17. An anti-PVRIG/anti-TIGIT bispecific antibody comprising:
a) a first antigen binding portion comprising an anti-PVRIG binding doming comprising:
i. a first heavy chain variable region comprising
CHA.7.518.4 VH
(QVQLVQSGAEVKKPGASVKVSCKASGYTFTDYNINWVRQAPGQ
GLEWMGYIYPYIGGSGYAQKFQGRVTMTRDTSTSTVYMELSSLRS
EDTAVYYCAREDKTARNAMDYWGQGTLVTVSS; SEQ ID
NO: 3179);
and
ii. a first light chain comprising CHA.7.518.4 VL
(DIQMTQSPSSLSASVGDRVTITCRVSENIYDVLAWYQQKPGKAPK
LLIYEATNLAEGVPSRFSGSGSGTDFTLTISSLQPEDFATYYCQHFW
GTPYTFGQGTKLEIK; SEQ ID NO: 3180);
and
b) a second antigen binding portion comprising an anti-TIGIT binding doming comprising:
i. a first heavy chain variable region comprising
CPA.9.086 VH
(EVQLVETGGGLIQPGRSLRLSCAASGFTFSSYAMHWVRQAPGKG
LEWVAVISYAGEVKYYADSVKGRFTISRDNSKNTLYLQMNSLRAE
DTAVYYCARDPLPLHYYGMDVWGQGTTVTVSS; SEQ ID
NO: 1634);
and
ii. a first light chain variable region comprising
CPA.9.086 VL
(QSALTQPRSASGNPGQRVTISCSGSSSNMGRRPVNWYQQIPGTAP
KLLIYSQNQRPSGVPDRFSGSQSGTSASLTISGLQSEDEAEYFCAV
WDDIGRVLQLGGGTQLAVL; SEQ ID NO: 1639).

18. An anti-PVRIG/anti-TIGIT bispecific antibody comprising:
a) a first antigen binding portion comprising an anti-PVRIG binding doming comprising:
i. a first heavy chain variable region comprising
CHA.7.518.1
(QVQLVQSGAEVKKPGASVKVSCKASGYTFTDYNINWVRQAPGQ
GLEWMGYIYPYIGGSGYAQKFQGRVTMTRDTSTSTVYMELSSLRS
EDTAVYYCAREDKTARNAMDYWGQGTLVTVSS; SEQ ID NO:
1539);
and
ii. a first light chain variable region comprising
CHA.7.518.1 VL
(DIQMTQSPSSLSASVGDRVTITCRVSENIYSNLAWYQQKPGKAPK
LLIYEATNLAEGVPSRFSGSGSGTDFTLTISSLQPEDFATYYCQHFW
GTPYTFGQGTKLEIK; SEQ ID NO: 1544);
and
b) a second antigen binding portion comprising an anti-TIGIT binding doming comprising:
i. a first heavy chain variable region comprising
CHA.9.547.18 HC
(EVQLVESGGGLVQPGGSLRLSCAASGFTFSSYIMSWVRQAPGKGL
EWVATISGGSKGQYYADSVKGRFTISRDNSKNTLYLQMNSLRAED
TAVYYCAKWLLSYYAMDYWGQGTLVTVSS; SEQ ID NO: 1664);
and
ii. a first light chain variable region comprising
CHA.9.547.18 VL
(DIQMTQSPSSLSASVGDRITITCRASQSMAIWLSWYQQKPGKAPK
LLIYKASKSHTGVPSRFSGSGSGTDFTLTISSLQPEDFATYYCQQGQ
SYPYTFGQGTKLEIK; SEQ ID NO: 1668).

19. An anti-PVRIG/anti-TIGIT bispecific antibody comprising:
a) a first antigen binding portion comprising an anti-PVRIG binding doming comprising:
i. a first heavy chain variable region comprising
CHA.7.518.4 VH
(QVQLVQSGAEVKKPGASVKVSCKASGYTFTDYNMWVRQAPGQ
GLEWMGYIYPYIGGSGYAQKFQGRVTMTRDTSTSTVYMELSSLRS
EDTAVYYCAREDKTARNAMDYWGQGTLVTVSS; SEQ ID
NO: 3179);
and
ii. a first light chain comprising CHA.7.518.4 VL
(DIQMTQSPSSLSASVGDRVTITCRVSENIYDVLAWYQQKPGKAPK
LLIYEATNLAEGVPSRFSGSGSGTDFTLTISSLQPEDFATYYCQHFW
GTPYTFGQGTKLEIK; SEQ ID NO: 3180);
and
b) a second antigen binding portion comprising an anti-TIGIT binding doming comprising:
i. a first heavy chain variable region comprising
CHA.9.547.18 HC
(EVQLVESGGGLVQPGGSLRLSCAASGFTFSSYIMSWVRQAPGKGL
EWVATISGGSKGQYYADSVKGRFTISRDNSKNTLYLQMNSLRAED
TAVYYCAKWLLSYYAMDYWGQGTLVTVSS (SEQ ID NO: 1664);
and
ii. a first light chain variable region comprising
CHA.9.547.18 VL
(DIQMTQSPSSLSASVGDRITITCRASQSMAIWLSWYQQKPGKAPK
LLIYKASKSHTGVPSRFSGSGSGTDFTLTISSLQPEDFATYYCQQGQ
SYPYTFGQGTKLEIK; SEQ ID NO: 1668).

20. An anti-PVRIG/anti-TIGIT bispecific antibody according to claim 1 wherein said anti-PVRIG/anti-TIGIT bispecific antibody is a humanized antibody.

21. A composition comprising an anti-PVRIG/anti-TIGIT bispecific antibody according to claim 1.

22. A nucleic acid composition comprising:
a) a first nucleic acid encoding a first heavy chain or heavy chain variable domain according to claim 1;
b) a second nucleic acid encoding a first light chain or light chain variable domain according to claim 1;
c) a third nucleic acid encoding a second heavy chain or heavy chain variable domain according to claim 1; and
d) a fourth nucleic acid encoding a second light chain or light chain variable domain according to claim 1.

23. An expression vector composition comprising:
a) a first expression vector comprising the first nucleic acid of claim 22;
b) a second expression vector comprising the second nucleic acid of claim 22;
c) a third expression vector comprising the third nucleic acid of claim 22; and
d) a fourth expression vector comprising the fourth nucleic acid of claim 22.

24. (canceled)

25. A host cell comprising the expression vector composition of claim 23.

26. A method of making an anti-PVRIG/anti-TIGIT bispecific antibody comprising:
a) culturing the host cell of claim 25 under conditions wherein the antibody is expressed; and
b) recovering the antibody.

27. A method of activating T cells of a patient comprising administering the anti-PVRIG/anti-TIGIT bispecific antibody of claim 1 to the patient, wherein a subset of the T cells of the patient are activated.

28. A method of activating cytotoxic T cells (CTLs) of a patient comprising administering the anti-PVRIG/anti-TIGIT bispecific antibody of claim 1 to the patient, wherein a subset of the CTLs of the patient are activated.

29. A method of activating NK cells of a patient comprising administering the anti-PVRIG/anti-TIGIT bispecific antibody of claim 1 to the patient, wherein a subset of the NK cells of the patient are activated.

30. A method of activating γδ T cells of a patient comprising administering the anti-PVRIG/anti-TIGIT bispecific antibody of claim 1 to the patient, wherein a subset of the γδ T cells of the patient are activated.

31. A method of activating Th1 cells of a patient comprising administering the anti-PVRIG/anti-TIGIT bispecific antibody of claim 1 to the patient, wherein a subset of the Th1 cells of the patient are activated.

32. A method of decreasing or eliminating cell number and/or activity of at least one of regulatory T cells (Tregs) in a patient comprising administering the anti-PVRIG/anti-TIGIT bispecific antibody of claim 1 to the patient.

33. A method of increasing interferon-γ production and/or pro-inflammatory cytokine secretion in a patient comprising administering the anti-PVRIG/anti-TIGIT bispecific antibody of claim 1 to the patient.

34. A method of treating cancer in a patient comprising administering the anti-PVRIG/anti-TIGIT antibody of claim 1 to the patient.

35. (canceled)

36. (canceled)

37. An anti-PVRIG/anti-TIGIT bispecific antibody comprising:
a) a first antigen binding portion comprising an anti-PVRIG antigen binding portion comprising:
i. a first heavy chain variable domain comprising a vhCDR1, vhCDR2, and vhCDR3 from an anti-PVRIG antibody; and
ii. a first light chain variable domain comprising a vlCDR1, vlCDR2, and vlCDR3 from an anti-PVRIG antibody;
wherein the anti-PVRIG antigen binding portion is selected from the group consisting of CPA.7.021, CPA.7.001, CPA.7.003, CPA.7.004, CPA.7.006, CPA.7.008, CPA.7.009, CPA.7.010, CPA.7.011, CPA.7.012, CPA.7.013, CPA.7.014, CPA.7.015, CPA.7.017, CPA.7.018, CPA.7.019, CPA.7.022, CPA.7.023, CPA.7.024, CPA.7.033, CPA.7.034, CPA.7.036, CPA.7.040, CPA.7.046, CPA.7.047, CPA.7.049, CPA.7.050, CHA.7.502, CHA.7.503, CHA.7.506, CHA.7.508, CHA.7.510, CHA.7.512, CHA.7.514, CHA.7.516, CHA.7.518, CHA.7.520.1, CHA.7.520.2, CHA.7.522, CHA.7.524, CHA.7.526, CHA.7.527, CHA.7.528, CHA.7.530, CHA.7.534, CHA.7.535, CHA.7.537, CHA.7.538.1, CHA.7.538.2, CHA.7.543, CHA.7.544, CHA.7.545, CHA.7.546, CHA.7.547, CHA.7.548, CHA.7.549, CHA.7.550, CHA.7.518.1; CHA7.538.1.2 and CHA.7.518.4; and
b) a second antigen binding portion comprising an anti-TIGIT antigen binding domain, wherein the anti-TIGIT antigen binding domain is from an antibody as provided in FIGS. 24 and 41, and in particular FIG. 24A-24EE.

38. An anti-PVRIG/anti-TIGIT bispecific antibody comprising:
a) a first antigen binding portion comprising an anti-PVRIG antigen binding domain wherein the anti-PVRIG antigen binding domain is from an antibody as provided in FIG. 35; and
b) a second antigen binding portion comprising an anti-TIGIT antigen binding domain comprising:
i. a second heavy chain variable domain comprising a vhCDR1, vhCDR2, and vhCDR3 from an anti-TIGIT antibody; and
ii. a second light chain variable domain comprising a vlCDR1, vlCDR2, and vlCDR3 from an anti-TIGIT antibody;
wherein the anti-TIGIT antigen binding domain is selected from the group consisting of CPA.9.018, CPA.9.027, CPA.9.049, CPA.9.057, CPA.9.059, CPA.9.083, CPA.9.086, CPA.9.089, CPA.9.093, CPA.9.101, CPA.9.103, CHA.9.536.1, CHA.9.536.3, CHA.9.536.4, CHA.9.536.5, CHA.9.536.6, CHA.9.536.7, CHA.9.536.8, CHA.9.560.1, CHA.9.560.3, CHA.9.560.4, CHA.9.560.5, CHA.9.560.6, CHA.9.560.7, CHA.9.560.8, CHA.9.546.1, CHA.9.547.1, CHA.9.547.2, CHA.9.547.3, CHA.9.547.4, CHA.9.547.6, CHA.9.547.7, CHA.9.547.8, CHA.9.547.9, CHA.9.547.13, CHA.9.541.1, CHA.9.541.3, CHA.9.541.4, CHA.9.541.5, CHA.9.541.6, CHA.9.541.7, CHA.9.541.8, and CHA.9.547.18.

39. An anti-PVRIG antibody comprising:
i) a heavy chain or heavy chain variable domain
comprising the vhCDR1, vhCDR2, and vhCDR3
from the following sequence:
(SEQ ID NO: 3179)
QVQLVQSGAEVKKPGASVKVSCKASGYTFTDYNINWVRQAPGQGLEWMGY
IYPYIGGSGYAQKFQGRVTMTRDTSTSTVYMELSSLRSEDTAVYYCARED
KTARNAMDYWGQGTLVTVSS,
and
ii) a light chain or light chain variable domain
comprising the vlCDR1, vlCDR2, vlCDR3 from
the following sequence:
(SEQ ID NO: 3180)
DIQMTQSPSSLSASVGDRVTITCRVSENIYDVLAWYQQKPGKAPKLLIYE
ATNLAEGVPSRFSGSGSGTDFTLTISSLQPEDFATYYCQHFWGTPYTF
GQGTKLEIK.

40. An anti-TIGIT antibody comprising:
i) a heavy chain or heavy chain variable domain
comprising the vhCDR1, vhCDR2, and vhCDR3 from
the following sequence:
(SEQ ID NO: 1664)
EVQLVESGGGLVQPGGSLRLSCAASGFTFSSYIMSWVRQAPGKGLEWVA
TISGGSKGQYYADSVKGRFTISRDNSKNTLYLQMNSLRAEDTAVYYCAKW
LLSYYAMDYWGQGTLVTVSS,
and
ii) a light chain or light chain variable domain
comprising the vlCDR1, vlCDR2, and vlCDR3
from the following sequence:
(SEQ ID NO: 1668)
DIQMTQSPSSLSASVGDRITITCRASQSMAIWLSWYQQKPGKAPKLLIYK
ASKSHTGVPSRFSGSGSGTDFTLTISSLQPEDFATYYCQQGQSYPYTFG
QGTKLEIK.

41. (canceled)

42. A composition comprising an anti-PVRIG antibody according to claim 38.

43. A nucleic acid composition comprising:
i) a first nucleic acid encoding a heavy chain or heavy chain variable domain according to claim 38; and
ii) a second nucleic acid encoding a light chain or light chain variable domain according to claim 38.

44. (canceled)

45. A nucleic acid composition comprising:
i) a first nucleic acid encoding a heavy chain or heavy chain variable domain according to claim 38; and
ii) a second nucleic acid encoding a light chain or light chain variable domain according to claim 38.

46. (canceled)

47. (canceled)

48. An expression vector composition comprising:
i) a first expression vector comprising the first nucleic acid of claim 43; and
ii) a second expression vector comprising the second nucleic acid of claim 43.

49. An expression vector comprising:
i) the first nucleic acid of claim 43; and
ii) the second nucleic acid of claim 43.

50. A host cell comprising the expression vector or vector composition of anyone of claim 48.

51. A method of making an anti-PVRIG or anti-TIGIT antibody comprising:
i) culturing the host cell of claim 48 under conditions wherein the antibody is expressed; and
ii) recovering the antibody.

52.-58. (canceled)

59. A method of treating cancer in a patient comprising administering the anti-PVRIG or anti-TIGIT antibody of claim 38 to the patient.

60. (canceled)

61. (canceled)

62. A method of treating cancer in a patient comprising administering a combination therapy comprising an anti-PVRIG/anti-TIGIT bispecific antibody according to claim 1.

63. A method of treating cancer in a patient comprising administering a combination therapy comprising an anti-PVRIG antibody of claim 38 and an anti-PD-1 antibody.

64. (canceled)

65. A method of treating cancer in a patient comprising administering a combination therapy comprising an anti-TIGIT antibody of claim 39 and an anti-PD-1 antibody.

66. (canceled)

67. A method of treating cancer in a patient comprising administering a combination therapy comprising an anti-TIGIT antibody of claim 39 and an anti-PVRIG antibody of claim 38.

68. A method of treating cancer in a patient comprising administering a triple combination therapy comprising an anti-TIGIT antibody of claim 39, an anti-PVRIG antibody, and an anti-PD-1 antibody.

69. A method of treating cancer in a patient comprising administering a triple combination therapy comprising an anti-TIGIT, an anti-PVRIG antibody of claim 38, and an anti-PD-1 antibody.

70. A method of treating cancer in a patient comprising administering a triple combination therapy comprising an anti-TIGIT of claim 39, an anti-PVRIG antibody of claim 38, and an anti-PD-1 antibody.

71.-80. (canceled)

The application's sequence listing, which the Patent Office published only in electronic form, follows.

SEQUENCE LISTING (3666 sequences)

SEQ ID NO: 1 - protein, 204 aa, Homo sapiens
MGHRTLVLPWVLLTLCVTAGTPEVWVQVRMEATELSSFTIRCGFLGSGSISLVTVSWGGPNGAGGTTLAVLHPERGIRQWAPARQARWETQSSISLILEGSGASSPCANTTFCCKFASFPEGSWEACGSLPPSSDPGLSAPPTPAPILRADLAGILGVSGVLLFGCVYLLHLLRRHKHRPAPRLQPSRTSPQAPRARAWAPSQA

SEQ ID NO: 2 - protein, 224 aa, Homo sapiens
MRTEAQVPALQPPEPGLEGAMGHRTLVLPWVLLTLCVTAGTPEVWVQVRMEATELSSFTIRCGFLGSGSISLVTVSWGGPNGAGGTTLAVLHPERGIRQWAPARQARWETQSSISLILEGSGASSPCANTTFCCKFASFPEGSWEACGSLPPSSDPGLSAPPTPAPILRADLAGILGVSGVLLFGCVYLLHLLRRHKHRPAPRLQPSRTSPQAPRARAWAPSQA

SEQ ID NO: 3 - protein, 326 aa, Homo sapiens
MRTEAQVPALQPPEPGLEGAMGHRTLVLPWVLLTLCVTAGTPEVWVQVRMEATELSSFTIRCGFLGSGSISLVTVSWGGPNGAGGTTLAVLHPERGIRQWAPARQARWETQSSISLILEGSGASSPCANTTFCCKFASFPEGSWEACGSLPPSSDPGLSAPPTPAPILRADLAGILGVSGVLLFGCVYLLHLLRRHKHRPAPRLQPSRTSPQAPRARAWAPSQASQAALHVPYATINTSCRPATLDTAHPHGGPSWWASLPTHAAHRPQGPAAWASTPIPARGSFVSVENGLYAQAGERPPHTGPGLTLFPDPRGPRAMEGPLGVR

SEQ ID NO: 4 - protein, 479 aa, Homo sapiens
MARAAALLPSRSPPTPLLWPLLLLLLLETGAQDVRVQVLPEVRGQLGGTVELPCHLLPPVPGLYISLVTWQRPDAPANHQNVAAFHPKMGPSFPSPKPGSERLSFVSAKQSTGQDTEAELQDATLALHGLTVEDEGNYTCEFATFPKGSVRGMTWLRVIAKPKNQAEAQKVTFSQDPTTVALCISKEGRPPARISWLSSLDWEAKETQVSGTLAGTVTVTSRFTLVPSGRADGVTVTCKVEHESFEEPALIPVTLSVRYPPEVSISGYDDNWYLGRTDATLSCDVRSNPEPTGYDWSTTSGTFPTSAVAQGSQLVIHAVDSLFNTTFVCTVTNAVGMGRAEQVIFVRETPRASPRDVGPLVWGAVGGTLLVLLLLAGGSLAFILLRVRRRRKSPGGAGGGASGDGGFYDPKAQVLGNGDPVFWTPVVPGPMEPDGKDEEEEEEEEKAEKGLMLPPPPALEDDMESQLDGSLISRRAVYV

SEQ ID NO: 5 - protein, 518 aa, Homo sapiens
MARAAALLPSRSPPTPLLWPLLLLLLLETGAQDVRVQVLPEVRGQLGGTVELPCHLLPPVPGLYISLVTWQRPDAPANHQNVAAFHPKMGPSFPSPKPGSERLSFVSAKQSTGQDTEAELQDATLALHGLTVEDEGNYTCEFATFPKGSVRGMTWLRVIAKPKNQAEAQKVTFSQDPTTVALCISKEGRPPARISWLSSLDWEAKETQVSGTLAGTVTVTSRFTLVPSGRADGVTVTCKVEHESFEEPALIPVTLSVRYPPEVSISGYDDNWYLGRTDATLSCDVRSNPEPTGYDWSTTSGTFPTSAVAQGSQLVIHAVDSLFNTTFVCTVTNAVGMGRAEQVIFVRETPNTAGAGATGGIIGGIIAAIIATAVAATGILICRQQRKEQTLQGAEEDEDLEGPPSYKPPTPKAKLEAQEMPSQLFTLGASEHSPLKTPYFDAGASCTEQEMPRYHELPTLEERSGPLHPGATSLGSPIPVPPGPPAVEDVSLDLEDEEGEEEEEYLDKINPIYDALSY

SEQ ID NO: 6 - protein, 8 aa, Artificial Sequence
  source: /note="Description of Artificial Sequence: Synthetic peptide"
GGTFSSYA

SEQ ID NO: 7 - protein, 8 aa, Artificial Sequence
  source: /note="Description of Artificial Sequence: Synthetic peptide"
IIPIFGTA

SEQ ID NO: 8 - protein, 13 aa, Artificial Sequence
  source: /note="Description of Artificial Sequence: Synthetic peptide"
AREEVSSPYGMDV

SEQ ID NO: 9 - protein, 9 aa, Artificial Sequence
  source: /note="Description of Artificial Sequence: Synthetic peptide"
TGAVTSGHY

SEQ ID NO: 10 - protein, 3 aa, Artificial Sequence
  source: /note="Description of Artificial Sequence: Synthetic peptide"
DTG

SEQ ID NO: 11 - protein, 10 aa, Artificial Sequence
  source: /note="Description of Artificial Sequence: Synthetic peptide"
LLSYSGASWV

SEQ ID NO: 12 - protein, 8 aa, Artificial Sequence
  source: /note="Description of Artificial Sequence: Synthetic peptide"
GFSLSHFS

SEQ ID NO: 13 - protein, 8 aa, Artificial Sequence
  source: /note="Description of Artificial Sequence: Synthetic peptide"
FDPEEGGT

SEQ ID NO: 14 - protein, 14 aa, Artificial Sequence
  source: /note="Description of Artificial Sequence: Synthetic peptide"
ATGIWYSSGWPVDY

SEQ ID NO: 15 - protein, 11 aa, Artificial Sequence
  source: /note="Description of Artificial Sequence: Synthetic peptide"
QSLLDSSGYNY

SEQ ID NO: 16 - protein, 3 aa, Artificial Sequence
  source: /note="Description of Artificial Sequence: Synthetic peptide"
LGS

SEQ ID NO: 17 - protein, 9 aa, Artificial Sequence
  source: /note="Description of Artificial Sequence: Synthetic peptide"
MQALQTPIT

SEQ ID NO: 18 - protein, 8 aa, Artificial Sequence
  source: /note="Description of Artificial Sequence: Synthetic peptide"
GYTLTELS

SEQ ID NO: 19 - protein, 8 aa, Artificial Sequence
  source: /note="Description of Artificial Sequence: Synthetic peptide"
FDPEDGET

SEQ ID NO: 20 - protein, 18 aa, Artificial Sequence
  source: /note="Description of Artificial Sequence: Synthetic peptide"
ATVSRVRGVINYYYYMDV

SEQ ID NO: 21 - protein, 11 aa, Artificial Sequence
  source: /note="Description of Artificial Sequence: Synthetic peptide"
QSLLYRNGNNY

SEQ ID NO: 22 - protein, 3 aa, Artificial Sequence
  source: /note="Description of Artificial Sequence: Synthetic peptide"
LGS

SEQ ID NO: 23 - protein, 9 aa, Artificial Sequence
  source: /note="Description of Artificial Sequence: Synthetic peptide"
MQALQTPPT

SEQ ID NO: 24 - protein, 8 aa, Artificial Sequence
  source: /note="Description of Artificial Sequence: Synthetic peptide"
GGTFGTYA

SEQ ID NO: 25 - protein, 8 aa, Artificial Sequence
  source: /note="Description of Artificial Sequence: Synthetic peptide"
ITPISATI

SEQ ID NO: 26 - protein, 13 aa, Artificial Sequence
  source: /note="Description of Artificial Sequence: Synthetic peptide"
ARGFEYSDGLLDD

SEQ ID NO: 27 - protein, 12 aa, Artificial Sequence
  source: /note="Description of Artificial Sequence: Synthetic peptide"
QSLFYSDDGNTY

SEQ ID NO: 28 - protein, 3 aa, Artificial Sequence
  source: /note="Description of Artificial Sequence: Synthetic peptide"
RLS

SEQ ID NO: 29 - protein, 9 aa, Artificial Sequence
  source: /note="Description of Artificial Sequence: Synthetic peptide"
MQHMEFPLT

SEQ ID NO: 30 - protein, 9 aa, Artificial Sequence
  source: /note="Description of Artificial Sequence: Synthetic peptide"
SGSISSTNW

SEQ ID NO: 31 - protein, 7 aa, Artificial Sequence
  source: /note="Description of Artificial Sequence: Synthetic peptide"
IYHSGST

SEQ ID NO: 32 - protein, 10 aa, Artificial Sequence
  source: /note="Description of Artificial Sequence: Synthetic peptide"
ARVGPAAIYY

SEQ ID NO: 33 - protein, 8 aa, Artificial Sequence
  source: /note="Description of Artificial Sequence: Synthetic peptide"
SNNVGYEG

SEQ ID NO: 34 - protein, 3 aa, Artificial Sequence
  source: /note="Description of Artificial Sequence: Synthetic peptide"
RNN

SEQ ID NO: 35 - protein, 11 aa, Artificial Sequence
  source: /note="Description of Artificial Sequence: Synthetic peptide"
SAWDSSLNAVV

SEQ ID NO: 36 - protein, 8 aa, Artificial Sequence
  source: /note="Description of Artificial Sequence: Synthetic peptide"
GYTLTELS

SEQ ID NO: 37 - protein, 8 aa, Artificial Sequence
  source: /note="Description of Artificial Sequence: Synthetic peptide"
FDPEDGET

SEQ ID NO: 38 - protein, 21 aa, Artificial Sequence
  source: /note="Description of Artificial Sequence: Synthetic peptide"
ATAKPGIAVAGQNYYYYYMDV

SEQ ID NO: 39 - protein, 11 aa, Artificial Sequence
  source: /note="Description of Artificial Sequence: Synthetic peptide"
QSLLYRNGNNY

SEQ ID NO: 40 - protein, 3 aa, Artificial Sequence
  source: /note="Description of Artificial Sequence: Synthetic peptide"
LGS

SEQ ID NO: 41 - protein, 9 aa, Artificial Sequence
  source: /note="Description of Artificial Sequence: Synthetic peptide"
MQALQTPPT

SEQ ID NO: 42 - protein, 8 aa, Artificial Sequence
  source: /note="Description of Artificial Sequence: Synthetic peptide"
GFTFSSYA

SEQ ID NO: 43 - protein, 8 aa, Artificial Sequence
  source: /note="Description of Artificial Sequence: Synthetic peptide"
ISYDGSNK

SEQ ID NO: 44 - protein, 17 aa, Artificial Sequence
  source: /note="Description of Artificial Sequence: Synthetic peptide"
ASSPIGYSYGYWGGMDV

SEQ ID NO: 45 - protein, 9 aa, Artificial Sequence
  source: /note="Description of Artificial Sequence: Synthetic peptide"
SGIDVRTNK

SEQ ID NO: 46 - protein, 7 aa, Artificial Sequence
  source: /note="Description of Artificial Sequence: Synthetic peptide"
FQSDSDK

SEQ ID NO: 47 - protein, 9 aa, Artificial Sequence
  source: /note="Description of Artificial Sequence: Synthetic peptide"
LIWHTSGWV

SEQ ID NO: 48 - protein, 8 aa, Artificial Sequence
  source: /note="Description of Artificial Sequence: Synthetic peptide"
GYTLTELS

SEQ ID NO: 49 - protein, 8 aa, Artificial Sequence
  source: /note="Description of Artificial Sequence: Synthetic peptide"
FDPEDGET

SEQ ID NO: 50 - protein, 17 aa, Artificial Sequence
  source: /note="Description of Artificial Sequence: Synthetic peptide"
ATGPAAAGVGYYYYMDV

SEQ ID NO: 51 - protein, 11 aa, Artificial Sequence
  source: /note="Description of Artificial Sequence: Synthetic peptide"
QSLLYRNGYNY

SEQ ID NO: 52 - protein, 3 aa, Artificial Sequence
  source: /note="Description of Artificial Sequence: Synthetic peptide"
LGS

SEQ ID NO: 53 - protein, 9 aa, Artificial Sequence
  source: /note="Description of Artificial Sequence: Synthetic peptide"
MQALQTPPT

SEQ ID NO: 54 - protein, 8 aa, Artificial Sequence
  source: /note="Description of Artificial Sequence: Synthetic peptide"
GFTFSSYA

SEQ ID NO: 55 - protein, 8 aa, Artificial Sequence
  source: /note="Description of Artificial Sequence: Synthetic peptide"
ISYDGSNK

SEQ ID NO: 56 - protein, 20 aa, Artificial Sequence
  source: /note="Description of Artificial Sequence: Synthetic peptide"
ARDVMVYCSSTSCYFYGMDV

SEQ ID NO: 57 - protein, 6 aa, Artificial Sequence
  source: /note="Description of Artificial Sequence: Synthetic peptide"
QDIRDY

SEQ ID NO: 58 - protein, 3 aa, Artificial Sequence
  source: /note="Description of Artificial Sequence: Synthetic peptide"
DAS

SEQ ID NO: 59 - protein, 9 aa, Artificial Sequence
  source: /note="Description of Artificial Sequence: Synthetic peptide"
QQFENLPIT

SEQ ID NO: 60 - protein, 8 aa, Artificial Sequence
  source: /note="Description of Artificial Sequence: Synthetic peptide"
GYTLTELS

SEQ ID NO: 61 - protein, 8 aa, Artificial Sequence
  source: /note="Description of Artificial Sequence: Synthetic peptide"
FDPEDGET

SEQ ID NO: 62 - protein, 18 aa, Artificial Sequence
  source: /note="Description of Artificial Sequence: Synthetic peptide"
ATGGYSSGFNYYYYYMDV

SEQ ID NO: 63 - protein, 11 aa, Artificial Sequence
  source: /note="Description of Artificial Sequence: Synthetic peptide"
QSLLYRNGNNY

SEQ ID NO: 64 - protein, 3 aa, Artificial Sequence
  source: /note="Description of Artificial Sequence: Synthetic peptide"
LGS

SEQ ID NO: 65 - protein, 9 aa, Artificial Sequence
  source: /note="Description of Artificial Sequence: Synthetic peptide"
MQALQTPPT

SEQ ID NO: 66 - protein, 8 aa, Artificial Sequence
  source: /note="Description of Artificial Sequence: Synthetic peptide"
GYTLTELS

SEQ ID NO: 67 - protein, 8 aa, Artificial Sequence
  source: /note="Description of Artificial Sequence: Synthetic peptide"
FDPEDGET

SEQ ID NO: 68 - protein, 14 aa, Artificial Sequence
  source: /note="Description of Artificial Sequence: Synthetic peptide"
ATGVTTYYYYGMDV

SEQ ID NO: 69 - protein, 11 aa, Artificial Sequence
  source: /note="Description of Artificial Sequence: Synthetic peptide"
QSLLYSNGNNF

SEQ ID NO: 70 - protein, 3 aa, Artificial Sequence
  source: /note="Description of Artificial Sequence: Synthetic peptide"
LGS

SEQ ID NO: 71 - protein, 9 aa, Artificial Sequence
  source: /note="Description of Artificial Sequence: Synthetic peptide"
MQALQTPPT

SEQ ID NO: 72 - protein, 8 aa, Artificial Sequence
  source: /note="Description of Artificial Sequence: Synthetic peptide"
GFTFSSYG

SEQ ID NO: 73 - protein, 8 aa, Artificial Sequence
  source: /note="Description of Artificial Sequence: Synthetic peptide"
IRYDGSNK

SEQ ID NO: 74 - protein, 14 aa, Artificial Sequence
  source: /note="Description of Artificial Sequence: Synthetic peptide"
ARDLFDFWWDGMDV

SEQ ID NO: 75 - protein, 7 aa, Artificial Sequence
  source: /note="Description of Artificial Sequence: Synthetic peptide"
QSVSSMY

SEQ ID NO: 76 - protein, 3 aa, Artificial Sequence
  source: /note="Description of Artificial Sequence: Synthetic peptide"
GAS

SEQ ID NO: 77 - protein, 10 aa, Artificial Sequence
  source: /note="Description of Artificial Sequence: Synthetic peptide"
QQYVSSPMYT

SEQ ID NO: 78 - protein, 8 aa, Artificial Sequence
  source: /note="Description of Artificial Sequence: Synthetic peptide"
GGTFNNYG

SEQ ID NO: 79 - protein, 8 aa, Artificial Sequence
  source: /note="Description of Artificial Sequence: Synthetic peptide"
IIPLFGTT

SEQ ID NO: 80 - protein, 15 aa, Artificial Sequence
  source: /note="Description of Artificial Sequence: Synthetic peptide"
ARDRMAADGMAVFDY

SEQ ID NO: 81 - protein, 8 aa, Artificial Sequence
  source: /note="Description of Artificial Sequence: Synthetic peptide"
SSNIGRHF

SEQ ID NO: 82 - protein, 3 aa, Artificial Sequence
  source: /note="Description of Artificial Sequence: Synthetic peptide"
KND

SEQ ID NO: 83 - protein, 11 aa, Artificial Sequence
  source: /note="Description of Artificial Sequence: Synthetic peptide"
SSWDAALNGVV

SEQ ID NO: 84 - protein, 8 aa, Artificial Sequence
  source: /note="Description of Artificial Sequence: Synthetic peptide"
GYTLTELS

SEQ ID NO: 85 - protein, 8 aa, Artificial Sequence
  source: /note="Description of Artificial Sequence: Synthetic peptide"
FDPEDGET

SEQ ID NO: 86 - protein, 19 aa, Artificial Sequence
  source: /note="Description of Artificial Sequence: Synthetic peptide"
ATEVPMVRGARRYYYYMDV

SEQ ID NO: 87 - protein, 11 aa, Artificial Sequence
  source: /note="Description of Artificial Sequence: Synthetic peptide"
QTLLYINENNY

SEQ ID NO: 88 - protein, 3 aa, Artificial Sequence
  source: /note="Description of Artificial Sequence: Synthetic peptide"
LGS

SEQ ID NO: 89 - protein, 9 aa, Artificial Sequence
  source: /note="Description of Artificial Sequence: Synthetic peptide"
MQGLQTPPT

SEQ ID NO: 90 - protein, 10 aa, Artificial Sequence
  source: /note="Description of Artificial Sequence: Synthetic peptide"
GGSISNSNYY

SEQ ID NO: 91 - protein, 7 aa, Artificial Sequence
  source: /note="Description of Artificial Sequence: Synthetic peptide"
IYYSGST

SEQ ID NO: 92 - protein, 15 aa, Artificial Sequence
  source: /note="Description of Artificial Sequence: Synthetic peptide"
ARGAWELSLGDWFDP

SEQ ID NO: 93 - protein, 9 aa, Artificial Sequence
  source: /note="Description of Artificial Sequence: Synthetic peptide"
SSNIGAGYD

SEQ ID NO: 94 - protein, 3 aa, Artificial Sequence
  source: /note="Description of Artificial Sequence: Synthetic peptide"
GNN

SEQ ID NO: 95 - protein, 12 aa, Artificial Sequence
  source: /note="Description of Artificial Sequence: Synthetic peptide"
QSYDSSLSVYVV

SEQ ID NO: 96 - protein, 8 aa, Artificial Sequence
  source: /note="Description of Artificial Sequence: Synthetic peptide"
GFTFGTSS

SEQ ID NO: 97 - protein, 8 aa, Artificial Sequence
  source: /note="Description of Artificial Sequence: Synthetic peptide"
ISFDGTEI

SEQ ID NO: 98 - protein, 15 aa, Artificial Sequence
  source: /note="Description of Artificial Sequence: Synthetic peptide"
AKGSGNIYFYSGMDV

SEQ ID NO: 99 - protein, 6 aa, Artificial Sequence
  source: /note="Description of Artificial Sequence: Synthetic peptide"
QSISGW

SEQ ID NO: 100 - protein, 3 aa, Artificial Sequence
  source: /note="Description of Artificial Sequence: Synthetic peptide"
ETS

SEQ ID NO: 101 - protein, 9 aa, Artificial Sequence
  source: /note="Description of Artificial Sequence: Synthetic peptide"
QQYYSYPLT

SEQ ID NO: 102 - protein, 8 aa, Artificial Sequence
  source: /note="Description of Artificial Sequence: Synthetic peptide"
GYTLTELS

SEQ ID NO: 103 - protein, 8 aa, Artificial Sequence
  source: /note="Description of Artificial Sequence: Synthetic peptide"
FDPEDGET

SEQ ID NO: 104 - protein, 19 aa, Artificial Sequence
  source: /note="Description of Artificial Sequence: Synthetic peptide"
ATGVPAAIGVYYYYYYMDV

SEQ ID NO: 105 - protein, 11 aa, Artificial Sequence
  source: /note="Description of Artificial Sequence: Synthetic peptide"
QSLLYSNGYNY

SEQ ID NO: 106 - protein, 3 aa, Artificial Sequence
  source: /note="Description of Artificial Sequence: Synthetic peptide"
LGS

SEQ ID NO: 107 - protein, 9 aa, Artificial Sequence
  source: /note="Description of Artificial Sequence: Synthetic peptide"
MQALQSPVT

SEQ ID NO: 108 - protein, 8 aa, Artificial Sequence
  source: /note="Description of Artificial Sequence: Synthetic peptide"
GYTLTELS

SEQ ID NO: 109 - protein, 8 aa, Artificial Sequence
  source: /note="Description of Artificial Sequence: Synthetic peptide"
FDPEDGET

SEQ ID NO: 110 - protein, 20 aa, Artificial Sequence
  source: /note="Description of Artificial Sequence: Synthetic peptide"
ATDSRDGPAARGGYYYYMDV

SEQ ID NO: 111 - protein, 11 aa, Artificial Sequence
  source: /note="Description of Artificial Sequence: Synthetic peptide"
QSLLYINGYNY

SEQ ID NO: 112 - protein, 3 aa, Artificial Sequence
  source: /note="Description of Artificial Sequence: Synthetic peptide"
LGS

SEQ ID NO: 113 - protein, 9 aa, Artificial Sequence
  source: /note="Description of Artificial Sequence: Synthetic peptide"
MQALQTPPT

SEQ ID NO: 114 - protein, 8 aa, Artificial Sequence
  source: /note="Description of Artificial Sequence: Synthetic peptide"
GGTFSSYA

SEQ ID NO: 115 - protein, 8 aa, Artificial Sequence
  source: /note="Description of Artificial Sequence: Synthetic peptide"
IIPIFGTA

SEQ ID NO: 116 - protein, 20 aa, Artificial Sequence
  source: /note="Description of Artificial Sequence: Synthetic peptide"
ARDAYYYDSSGYYNPDAFDI

SEQ ID NO: 117 - protein, 11 aa, Artificial Sequence
  source: /note="Description of Artificial Sequence: Synthetic peptide"
QSLLHSNGYNY

SEQ ID NO: 118 - protein, 3 aa, Artificial Sequence
  source: /note="Description of Artificial Sequence: Synthetic peptide"
LGS

SEQ ID NO: 119 - protein, 9 aa, Artificial Sequence
  source: /note="Description of Artificial Sequence: Synthetic peptide"
MQGLQTPRT

SEQ ID NO: 120 - protein, 8 aa, Artificial Sequence
  source: /note="Description of Artificial Sequence: Synthetic peptide"
GGTFSSSA

SEQ ID NO: 121 - protein, 8 aa, Artificial Sequence
  source: /note="Description of Artificial Sequence: Synthetic peptide"
IIPIYGIT

SEQ ID NO: 122 - protein, 22 aa, Artificial Sequence
  source: /note="Description of Artificial Sequence: Synthetic peptide"
ARDDTARRVRGVPYYYYYAMDV

SEQ ID NO: 123 - protein, 6 aa, Artificial Sequence
  source: /note="Description of Artificial Sequence: Synthetic peptide"
QDIDDD

SEQ ID NO: 124 - protein, 3 aa, Artificial Sequence
  source: /note="Description of Artificial Sequence: Synthetic peptide"
EAS

SEQ ID NO: 125 - protein, 9 aa, Artificial Sequence
  source: /note="Description of Artificial Sequence: Synthetic peptide"
LQHDNLPLT

SEQ ID NO: 126 - protein, 8 aa, Artificial Sequence
  source: /note="Description of Artificial Sequence: Synthetic peptide"
GYTLTELS

SEQ ID NO: 127 - protein, 8 aa, Artificial Sequence
  source: /note="Description of Artificial Sequence: Synthetic peptide"
FDPEDGET

SEQ ID NO: 128 - protein, 19 aa, Artificial Sequence
  source: /note="Description of Artificial Sequence: Synthetic peptide"
ATEDPGPVAGPYYYYGMDV

SEQ ID NO: 129 - protein, 11 aa, Artificial Sequence
  source: /note="Description of Artificial Sequence: Synthetic peptide"
QSLLYINGYHY

SEQ ID NO: 130 - protein, 3 aa, Artificial Sequence
  source: /note="Description of Artificial Sequence: Synthetic peptide"
LGS

SEQ ID NO: 131 - protein, 9 aa, Artificial Sequence
  source: /note="Description of Artificial Sequence: Synthetic peptide"
MQALQTPPT

SEQ ID NO: 132 - protein, 8 aa, Artificial Sequence
  source: /note="Description of Artificial Sequence: Synthetic peptide"
GGTFSSSA

SEQ ID NO: 133 - protein, 8 aa, Artificial Sequence
  source: /note="Description of Artificial Sequence: Synthetic peptide"
IIPIYGIT

SEQ ID NO: 134 - protein, 22 aa, Artificial Sequence
  source: /note="Description of Artificial Sequence: Synthetic peptide"
ARDDTARRVRGVPYYYYYAMDV

SEQ ID NO: 135 - protein, 12 aa, Artificial Sequence
  source: /note="Description of Artificial Sequence: Synthetic peptide"
QSLLDSDDGNTY

SEQ ID NO: 136 - protein, 3 aa, Artificial Sequence
  source: /note="Description of Artificial Sequence: Synthetic peptide"
TLS

SEQ ID NO: 137 - protein, 9 aa, Artificial Sequence
  source: /note="Description of Artificial Sequence: Synthetic peptide"
MQRLQFPLT

SEQ ID NO: 138 - protein, 8 aa, Artificial Sequence
  source: /note="Description of Artificial Sequence: Synthetic peptide"
GYTLTELS

SEQ ID NO: 139 - protein, 8 aa, Artificial Sequence
  source: /note="Description of Artificial Sequence: Synthetic peptide"
FDPEDGET

SEQ ID NO: 140 - protein, 19 aa, Artificial Sequence
  source: /note="Description of Artificial Sequence: Synthetic peptide"
ATGVPAAIGVYYYYYYMDV

SEQ ID NO: 141 - protein, 11 aa, Artificial Sequence
  source: /note="Description of Artificial Sequence: Synthetic peptide"
QSLLYRNGYNY

SEQ ID NO: 142 - protein, 3 aa, Artificial Sequence
  source: /note="Description of Artificial Sequence: Synthetic peptide"
WGS

SEQ ID NO: 143 - protein, 9 aa, Artificial Sequence
  source: /note="Description of Artificial Sequence: Synthetic peptide"
MQAVQNPPT

SEQ ID NO: 144 - protein, 8 aa, Artificial Sequence
  source: /note="Description of Artificial Sequence: Synthetic peptide"
GGTFSSSA

SEQ ID NO: 145 - protein, 8 aa, Artificial Sequence
  source: /note="Description of Artificial Sequence: Synthetic peptide"
IIPIYGIT

SEQ ID NO: 146 - protein, 22 aa, Artificial Sequence
  source: /note="Description of Artificial Sequence: Synthetic peptide"
ARDDTARRVRGVPYYYYYAMDV

SEQ ID NO: 147 - protein, 6 aa, Artificial Sequence
  source: /note="Description of Artificial Sequence: Synthetic peptide"
QTMNNY

SEQ ID NO: 148 - protein, 3 aa, Artificial Sequence
  source: /note="Description of Artificial Sequence: Synthetic peptide"
DAS

SEQ ID NO: 149 - protein, 10 aa, Artificial Sequence
  source: /note="Description of Artificial Sequence: Synthetic peptide"
QQYGDWLPIT

SEQ ID NO: 150 - protein, 8 aa, Artificial Sequence
  source: /note="Description of Artificial Sequence: Synthetic peptide"
GYTLTELS

SEQ ID NO: 151 - protein, 8 aa, Artificial Sequence
  source: /note="Description of Artificial Sequence: Synthetic peptide"
FDPEDGET

SEQ ID NO: 152 - protein, 17 aa, Artificial Sequence
  source: /note="Description of Artificial Sequence: Synthetic peptide"
ATAFPEATISYYYYMDV

SEQ ID NO: 153 - protein, 11 aa, Artificial Sequence
  source: /note="Description of Artificial Sequence: Synthetic peptide"
QSLLYRNGYNY

SEQ ID NO: 154 - protein, 3 aa, Artificial Sequence
  source: /note="Description of Artificial Sequence: Synthetic peptide"
WGS

SEQ ID NO: 155 - protein, 9 aa, Artificial Sequence
  source: /note="Description of Artificial Sequence: Synthetic peptide"
MQAVQNPPT

SEQ ID NO: 156 - protein, 8 aa, Artificial Sequence
  source: /note="Description of Artificial Sequence: Synthetic peptide"
GGTFSSSA

SEQ ID NO: 157 - protein, 8 aa, Artificial Sequence
  source: /note="Description of Artificial Sequence: Synthetic peptide"
IIPIYGIT

SEQ ID NO: 158 - protein, 22 aa, Artificial Sequence
  source: /note="Description of Artificial Sequence: Synthetic peptide"
ARDDTARRVRGVPYYYYYAMDV

SEQ ID NO: 159 - protein, 12 aa, Artificial Sequence
  source: /note="Description of Artificial Sequence: Synthetic peptide"
RSLLDSDDGNTH

SEQ ID NO: 160 - protein, 3 aa, Artificial Sequence
  source: /note="Description of Artificial Sequence: Synthetic peptide"
SLS

SEQ ID NO: 161 - protein, 9 aa, Artificial Sequence
  source: /note="Description of Artificial Sequence: Synthetic peptide"
MQRKEFPLT

SEQ ID NO: 162 - protein, 8 aa, Artificial Sequence
  source: /note="Description of Artificial Sequence: Synthetic peptide"
GGTFSSYA

SEQ ID NO: 163 - protein, 8 aa, Artificial Sequence
  source: /note="Description of Artificial Sequence: Synthetic peptide"
IIPIFGTA

SEQ ID NO: 164 - protein, 21 aa, Artificial Sequence
  source: /note="Description of Artificial Sequence: Synthetic peptide"
ARGPWYYDSSGYSSYAYYMDV

SEQ ID NO: 165 - protein, 11 aa, Artificial Sequence
  source: /note="Description of Artificial Sequence: Synthetic peptide"
QSLLHSDGYNY

SEQ ID NO: 166 - protein, 3 aa, Artificial Sequence
  source: /note="Description of Artificial Sequence: Synthetic peptide"
LGS

SEQ ID NO: 167 - protein, 10 aa, Artificial Sequence
  source: /note="Description of Artificial Sequence: Synthetic peptide"
MQALHTPGVT

SEQ ID NO: 168 - protein, 120 aa, Artificial Sequence
  source: /note="Description of Artificial Sequence: Synthetic polypeptide"
QMQLVQSGAEVKKPGSSVKVSCKASGGTFSSYAISWVRQAPGQGLEWMGGIIPIFGTANYAQKFQGRVTITADESTSTAYMELSSLRSEDTAVYYCAREEVSSPYGMDVWGQGTTVTVSS

SEQ ID NO: 169 - protein, 8 aa, Artificial Sequence
  source: /note="Description of Artificial Sequence: Synthetic peptide"
GGTFSSYA

SEQ ID NO: 170 - protein, 8 aa, Artificial Sequence
  source: /note="Description of Artificial Sequence: Synthetic peptide"
IIPIFGTA

SEQ ID NO: 171 - protein, 13 aa, Artificial Sequence
  source: /note="Description of Artificial Sequence: Synthetic peptide"
AREEVSSPYGMDV

SEQ ID NO: 172 - protein, 450 aa, Artificial Sequence
  source: /note="Description of Artificial Sequence: Synthetic polypeptide"
QMQLVQSGAEVKKPGSSVKVSCKASGGTFSSYAISWVRQAPGQGLEWMGGIIPIFGTANYAQKFQGRVTITADESTSTAYMELSSLRSEDTAVYYCAREEVSSPYGMDVWGQGTTVTVSSASTKGPSVFPLAPSSKSTSGGTAALGCLVKDYFPEPVTVSWNSGALTSGVHTFPAVLQSSGLYSLSSVVTVPSSSLGTQTYICNVNHKPSNTKVDKKVEPKSCDKTHTCPPCPAPELLGGPSVFLFPPKPKDTLMISRTPEVTCVVVDVSHEDPEVKFNWYVDGVEVHNAKTKPREEQYNSTYRVVSVLTVLHQDWLNGKEYKCKVSNKALPAPIEKTISKAKGQPREPQVYTLPPSREEMTKNQVSLTCLVKGFYPSDIAVEWESNGQPENNYKTTPPVLDSDGSFFLYSKLTVDKSRWQQGNVFSCSVMHEALHNHYTQKSLSLSPGK

SEQ ID NO: 173 - protein, 111 aa, Artificial Sequence
  source: /note="Description of Artificial Sequence: Synthetic polypeptide"
QAVVTQEPSLTVSPGGTVTLTCGTSTGAVTSGHYPYWFQQKPGQAPKTLIYDTGNKHSWTPARFSGSLLGGKAALTLSGAQPEDEADYYCLLSYSGASWVFGGGTKLTVLG

SEQ ID NO: 174 - protein, 9 aa, Artificial Sequence
  source: /note="Description of Artificial Sequence: Synthetic peptide"
TGAVTSGHY

SEQ ID NO: 175 - protein, 3 aa, Artificial Sequence
  source: /note="Description of Artificial Sequence: Synthetic peptide"
DTG

SEQ ID NO: 176 - protein, 10 aa, Artificial Sequence
  source: /note="Description of Artificial Sequence: Synthetic peptide"
LLSYSGASWV

SEQ ID NO: 177 - protein, 216 aa, Artificial Sequence
  source: /note="Description of Artificial Sequence: Synthetic polypeptide"
QAVVTQEPSLTVSPGGTVTLTCGTSTGAVTSGHYPYWFQQKPGQAPKTLIYDTGNKHSWTPARFSGSLLGGKAALTLSGAQPEDEADYYCLLSYSGASWVFGGGTKLTVLGQPKAAPSVTLFPPSSEELQANKATLVCLISDFYPGAVTVAWKADSSPVKAGVETTTPSKQSNNKYAASSYLSLTPEQWKSHRSYSCQVTHEGSTVEKTVAPTECS

SEQ ID NO: 178 - protein, 121 aa, Artificial Sequence
  source: /note="Description of Artificial Sequence: Synthetic polypeptide"
QVQLVQSGAEVKKPGASVKVSCKVSGFSLSHFSMHWVRQVPGKGLEWLGGFDPEEGGTIPAQKFQGRLTMTEDTSTETAYMELSSLRSEDTAVYYCATGIWYSSGWPVDYWGPGTLVTVSS

SEQ ID NO: 179 - protein, 8 aa, Artificial Sequence
  source: /note="Description of Artificial Sequence: Synthetic peptide"
GFSLSHFS

SEQ ID NO: 180 - protein, 8 aa, Artificial Sequence
  source: /note="Description of Artificial Sequence: Synthetic peptide"
FDPEEGGT

SEQ ID NO: 181 - protein, 14 aa, Artificial Sequence
  source: /note="Description of Artificial Sequence: Synthetic peptide"
ATGIWYSSGWPVDY

SEQ ID NO: 182 - protein, 458 aa, Artificial Sequence
  source: /note="Description of Artificial Sequence: Synthetic polypeptide"
EVQLVQSGAEVKKPGSSVKVSCKASGGTFSSYAISWVRQAPGQGLEWMGGIIPIFGTANYAQKFQGRVTITADKSTSTAYMELSSLRSEDTAVYYCARGPWYYDSSGYSSYAYYMDVWGQGTTVTVSSASTKGPSVFPLAPSSKSTSGGTAALGCLVKDYFPEPVTVSWNSGALTSGVHTFPAVLQSSGLYSLSSVVTVPSSSLGTQTYICNVNHKPSNTKVDKKVEPKSCDKTHTCPPCPAPELLGGPSVFLFPPKPKDTLMISRTPEVTCVVVDVSHEDPEVKFNWYVDGVEVHNAKTKPREEQYNSTYRVVSVLTVLHQDWLNGKEYKCKVSNKALPAPIEKTISKAKGQPREPQVYTLPPSREEMTKNQVSLTCLVKGFYPSDIAVEWESNGQPENNYKTTPPVLDSDGSFFLYSKLTVDKSRWQQGNVFSCSVMHEALHNHYTQKSLSLSPGK

SEQ ID NO: 183 - protein, 113 aa, Artificial Sequence
  source: /note="Description of Artificial Sequence: Synthetic polypeptide"
DVVMTQSPLSLPVTPGGPASISCRSSQSLLDSSGYNYVDWYLQKPGQSPQLLISLGSDRASGVPDRFSGSGSGTDFTLKISRVEAEDVGIYYCMQALQTPITFGQGTRLEIKR

SEQ ID NO: 184 - protein, 11 aa, Artificial Sequence
  source: /note="Description of Artificial Sequence: Synthetic peptide"
QSLLDSSGYNY

SEQ ID NO: 185 - protein, 3 aa, Artificial Sequence
  source: /note="Description of Artificial Sequence: Synthetic peptide"
LGS

SEQ ID NO: 186 - protein, 9 aa, Artificial Sequence
  source: /note="Description of Artificial Sequence: Synthetic peptide"
MQALQTPIT

SEQ ID NO: 187 - protein, 219 aa, Artificial Sequence
  source: /note="Description of Artificial Sequence: Synthetic polypeptide"
DVVMTQSPLSLPVTPGGPASISCRSSQSLLDSSGYNYVDWYLQKPGQSPQLLISLGSDRASGVPDRFSGSGSGTDFTLKISRVEAEDVGIYYCMQALQTPITFGQGTRLEIKRTVAAPSVFIFPPSDEQLKSGTASVVCLLNNFYPREAKVQWKVDNALQSGNSQESVTEQDSKDSTYSLSSTLTLSKADYEKHKVYACEVTHQGLSSPVTKSFNRGEC

SEQ ID NO: 188 - protein, 125 aa, Artificial Sequence
  source: /note="Description of Artificial Sequence: Synthetic polypeptide"
EVQLVQSGAEVKKPGASVKVSCKVSGYTLTELSMHWVRQAPGKGLEWMGGFDPEDGETIYAQKFQGRVTMTEDTSTDTAYMELSSLRSEDTAVYYCATVSRVRGVINYYYYMDVWGKGTTVTVSS

SEQ ID NO: 189 - protein, 8 aa, Artificial Sequence
  source: /note="Description of Artificial Sequence: Synthetic peptide"
GYTLTELS

SEQ ID NO: 190 - protein, 8 aa, Artificial Sequence
  source: /note="Description of Artificial Sequence: Synthetic peptide"
FDPEDGET

SEQ ID NO: 191 - protein, 18 aa, Artificial Sequence
  source: /note="Description of Artificial Sequence: Synthetic peptide"
ATVSRVRGVINYYYYMDV

SEQ ID NO: 192 - protein, 455 aa, Artificial Sequence
  source: /note="Description of Artificial Sequence: Synthetic polypeptide"
EVQLVQSGAEVKKPGASVKVSCKVSGYTLTELSMHWVRQAPGKGLEWMGGFDPEDGETIYAQKFQGRVTMTEDTSTDTAYMELSSLRSEDTAVYYCATVSRVRGVINYYYYMDVWGKGTTVTVSSASTKGPSVFPLAPSSKSTSGGTAALGCLVKDYFPEPVTVSWNSGALTSGVHTFPAVLQSSGLYSLSSVVTVPSSSLGTQTYICNVNHKPSNTKVDKKVEPKSCDKTHTCPPCPAPELLGGPSVFLFPPKPKDTLMISRTPEVTCVVVDVSHEDPEVKFNWYVDGVEVHNAKTKPREEQYNSTYRVVSVLTVLHQDWLNGKEYKCKVSNKALPAPIEKTISKAKGQPREPQVYTLPPSREEMTKNQVSLTCLVKGFYPSDIAVEWESNGQPENNYKTTPPVLDSDGSFFLYSKLTVDKSRWQQGNVFSCSVMHEALHNHYTQKSLSLSPGK

SEQ ID NO: 193 - protein, 113 aa, Artificial Sequence
  source: /note="Description of Artificial Sequence: Synthetic polypeptide"
DVVMTQSPLSLPVTPGEPASISCRSSQSLLYRNGNNYLDWYLQKPGQSPQLLIYLGSNRASGVPDRFSGSGSGTDFTLKISRVEAEDVGVYYCMQALQTPPTFGGGTKLEIKR

SEQ ID NO: 194 - protein, 11 aa, Artificial Sequence
  source: /note="Description of Artificial Sequence: Synthetic peptide"
QSLLYRNGNNY

SEQ ID NO: 195 - protein, 3 aa, Artificial Sequence
  source: /note="Description of Artificial Sequence: Synthetic peptide"
LGS

SEQ ID NO: 196 - protein, 9 aa, Artificial Sequence
  source: /note="Description of Artificial Sequence: Synthetic peptide"
MQALQTPPT

SEQ ID NO: 197 - protein, 219 aa, Artificial Sequence
  source: /note="Description of Artificial Sequence: Synthetic polypeptide"
DVVMTQSPLSLPVTPGEPASISCRSSQSLLYRNGNNYLDWYLQKPGQSPQLLIYLGSNRASGVPDRFSGSGSGTDFTLKISRVEAEDVGVYYCMQALQTPPTFGGGTKLEIKRTVAAPSVFIFPPSDEQLKSGTASVVCLLNNFYPREAKVQWKVDNALQSGNSQESVTEQDSKDSTYSLSSTLTLSKADYEKHKVYACEVTHQGLSSPVTKSFNRGEC

SEQ ID NO: 198 - protein, 120 aa, Artificial Sequence
  source: /note="Description of Artificial Sequence: Synthetic polypeptide"
QVQLVQSGAEVRRPGSSVRVSCKPSGGTFGTYAFTWVRQAPGQGLEWMGGITPISATINRAQNLQDRLTITADESTTTVHMDLTSLRSEDTAVYYCARGFEYSDGLLDDWGQGTLVTVSS

SEQ ID NO: 199 - protein, 8 aa, Artificial Sequence
  source: /note="Description of Artificial Sequence: Synthetic peptide"
GGTFGTYA

SEQ ID NO: 200 - protein, 8 aa, Artificial Sequence
  source: /note="Description of Artificial Sequence: Synthetic peptide"
ITPISATI

SEQ ID NO: 201 - protein, 13 aa, Artificial Sequence
  source: /note="Description of Artificial Sequence: Synthetic peptide"
ARGFEYSDGLLDD

SEQ ID NO: 202 - protein, 450 aa, Artificial Sequence
  source: /note="Description of Artificial Sequence: Synthetic polypeptide"
QVQLVQSGAEVRRPGSSVRVSCKPSGGTFGTYAFTWVRQAPGQGLEWMGGITPISATINRAQNLQDRLTITADESTTTVHMDLTSLRSEDTAVYYCARGFEYSDGLLDDWGQGTLVTVSSASTKGPSVFPLAPSSKSTSGGTAALGCLVKDYFPEPVTVSWNSGALTSGVHTFPAVLQSSGLYSLSSVVTVPSSSLGTQTYICNVNHKPSNTKVDKKVEPKSCDKTHTCPPCPAPELLGGPSVFLFPPKPKDTLMISRTPEVTCVVVDVSHEDPEVKFNWYVDGVEVHNAKTKPREEQYNSTYRVVSVLTVLHQDWLNGKEYKCKVSNKALPAPIEKTISKAKGQPREPQVYTLPPSREEMTKNQVSLTCLVKGFYPSDIAVEWESNGQPENNYKTTPPVLDSDGSFFLYSKLTVDKSRWQQGNVFSCSVMHEALHNHYTQKSLSLSPGK

SEQ ID NO: 203 - protein, 114 aa, Artificial Sequence
  source: /note="Description of Artificial Sequence: Synthetic polypeptide"
DIVMTQTPLSLPVIPGEPASISCRSSQSLFYSDDGNTYLDWYLQKPGQSPQLLIYRLSHRASGVPDRFSGSGSGTDFTLKISRVEAEDVGVYYCMQHMEFPLTFGGGTKVEIKR

SEQ ID NO: 204 - protein, 12 aa, Artificial Sequence
  source: /note="Description of Artificial Sequence: Synthetic peptide"
QSLFYSDDGNTY

SEQ ID NO: 205 - protein, 3 aa, Artificial Sequence
  source: /note="Description of Artificial Sequence: Synthetic peptide"
RLS

SEQ ID NO: 206 - protein, 9 aa, Artificial Sequence
  source: /note="Description of Artificial Sequence: Synthetic peptide"
MQHMEFPLT

SEQ ID NO: 207 - protein, 220 aa, Artificial Sequence
  source: /note="Description of Artificial Sequence: Synthetic polypeptide"
DIVMTQTPLSLPVIPGEPASISCRSSQSLFYSDDGNTYLDWYLQKPGQSPQLLIYRLSHRASGVPDRFSGSGSGTDFTLKISRVEAEDVGVYYCMQHMEFPLTFGGGTKVEIKRTVAAPSVFIFPPSDEQLKSGTASVVCLLNNFYPREAKVQWKVDNALQSGNSQESVTEQDSKDSTYSLSSTLTLSKADYEKHKVYACEVTHQGLSSPVTKSFNRGEC

SEQ ID NO: 208 - protein, 117 aa, Artificial Sequence
  source: /note="Description of Artificial Sequence: Synthetic polypeptide"
QVQLQESGPGLVKPSGTLSLTCVVSSGSISSTNWWTWVRQPPGKGLEWIGEIYHSGSTSYNSSLKSRVTISEDKSKNQISLRLSSVTAADTAVYYCARVGPAAIYYWGQGTLVTVSS

SEQ ID NO: 209 - protein, 9 aa, Artificial Sequence
  source: /note="Description of Artificial Sequence: Synthetic peptide"
SGSISSTNW

SEQ ID NO: 210 - protein, 7 aa, Artificial Sequence
  source: /note="Description of Artificial Sequence: Synthetic peptide"
IYHSGST

SEQ ID NO: 211 - protein, 10 aa, Artificial Sequence
  source: /note="Description of Artificial Sequence: Synthetic peptide"
ARVGPAAIYY

SEQ ID NO: 212 - protein, 447 aa, Artificial Sequence
  source: /note="Description of Artificial Sequence: Synthetic polypeptide"
QVQLQESGPGLVKPSGTLSLTCVVSSGSISSTNWWTWVRQPPGKGLEWIGEIYHSGSTSYNSSLKSRVTISEDKSKNQISLRLSSVTAADTAVYYCARVGPAAIYYWGQGTLVTVSSASTKGPSVFPLAPSSKSTSGGTAALGCLVKDYFPEPVTVSWNSGALTSGVHTFPAVLQSSGLYSLSSVVTVPSSSLGTQTYICNVNHKPSNTKVDKKVEPKSCDKTHTCPPCPAPELLGGPSVFLFPPKPKDTLMISRTPEVTCVVVDVSHEDPEVKFNWYVDGVEVHNAKTKPREEQYNSTYRVVSVLTVLHQDWLNGKEYKCKVSNKALPAPIEKTISKAKGQPREPQVYTLPPSREEMTKNQVSLTCLVKGFYPSDIAVEWESNGQPENNYKTTPPVLDSDGSFFLYSKLTVDKSRWQQGNVFSCSVMHEALHNHYTQKSLSLSPGK

SEQ ID NO: 213 - protein, 111 aa, Artificial Sequence
  source: /note="Description of Artificial Sequence: Synthetic polypeptide"
QAGLTQPPSVSKGLRQTATLTCTGNSNNVGYEGAAWLQQHQGHAPKLLLYRNNNRPSGISKRFSASRSGNTASLTITGLQPEDEADYYCSAWDSSLNAVVFGGGTQLTVLG

SEQ ID NO: 214 - protein, 8 aa, Artificial Sequence
  source: /note="Description of Artificial Sequence: Synthetic peptide"
SNNVGYEG

SEQ ID NO: 215 - protein, 3 aa, Artificial Sequence
  source: /note="Description of Artificial Sequence: Synthetic peptide"
RNN

SEQ ID NO: 216 - protein, 11 aa, Artificial Sequence
  source: /note="Description of Artificial Sequence: Synthetic peptide"
SAWDSSLNAVV

SEQ ID NO: 217 - protein, 216 aa, Artificial Sequence
  source: /note="Description of Artificial Sequence: Synthetic polypeptide"
QAGLTQPPSVSKGLRQTATLTCTGNSNNVGYEGAAWLQQHQGHAPKLLLYRNNNRPSGISKRFSASRSGNTASLTITGLQPEDEADYYCSAWDSSLNAVVFGGGTQLTVLGQPKAAPSVTLFPPSSEELQANKATLVCLISDFYPGAVTVAWKADSSPVKAGVETTTPSKQSNNKYAASSYLSLTPEQWKSHRSYSCQVTHEGSTVEKTVAPTECS

SEQ ID NO: 218 - protein, 128 aa, Artificial Sequence
  source: /note="Description of Artificial Sequence: Synthetic polypeptide"
EVQLVQSGAEVKKPGASVKVSCKVSGYTLTELSMHWVRQAPGKGLEWMGGFDPEDGETIYAQKFQGRVTMTEDTSTDTAYMELSSLRSEDTAVYYCATAKPGIAVAGQNYYYYYMDVWGKGTTVTVSS

SEQ ID NO: 219 - protein, 8 aa, Artificial Sequence
  source: /note="Description of Artificial Sequence: Synthetic peptide"
GYTLTELS

SEQ ID NO: 220 - protein, 8 aa, Artificial Sequence
  source: /note="Description of Artificial Sequence: Synthetic peptide"
FDPEDGET

SEQ ID NO: 221 - protein, 21 aa, Artificial Sequence
  source: /note="Description of Artificial Sequence: Synthetic peptide"
ATAKPGIAVAGQNYYYYYMDV

SEQ ID NO: 222 - protein, 458 aa, Artificial Sequence
  source: /note="Description of Artificial Sequence: Synthetic polypeptide"
EVQLVQSGAEVKKPGASVKVSCKVSGYTLTELSMHWVRQAPGKGLEWMGGFDPEDGETIYAQKFQGRVTMTEDTSTDTAYMELSSLRSEDTAVYYCATAKPGIAVAGQNYYYYYMDVWGKGTTVTVSSASTKGPSVFPLAPSSKSTSGGTAALGCLVKDYFPEPVTVSWNSGALTSGVHTFPAVLQSSGLYSLSSVVTVPSSSLGTQTYICNVNHKPSNTKVDKKVEPKSCDKTHTCPPCPAPELLGGPSVFLFPPKPKDTLMISRTPEVTCVVVDVSHEDPEVKFNWYVDGVEVHNAKTKPREEQYNSTYRVVSVLTVLHQDWLNGKEYKCKVSNKALPAPIEKTISKAKGQPREPQVYTLPPSREEMTKNQVSLTCLVKGFYPSDIAVEWESNGQPENNYKTTPPVLDSDGSFFLYSKLTVDKSRWQQGNVFSCSVMHEALHNHYTQKSLSLSPGK

SEQ ID NO: 223 - protein, 113 aa, Artificial Sequence; identical to SEQ ID NO: 193
  source: /note="Description of Artificial Sequence: Synthetic polypeptide"

SEQ ID NO: 224 - protein, 11 aa, Artificial Sequence
  source: /note="Description of Artificial Sequence: Synthetic peptide"
QSLLYRNGNNY

SEQ ID NO: 225 - protein, 3 aa, Artificial Sequence
  source: /note="Description of Artificial Sequence: Synthetic peptide"
LGS

SEQ ID NO: 226 - protein, 9 aa, Artificial Sequence
  source: /note="Description of Artificial Sequence: Synthetic peptide"
MQALQTPPT

SEQ ID NO: 227 - protein, 219 aa, Artificial Sequence; identical to SEQ ID NO: 197
  source: /note="Description of Artificial Sequence: Synthetic polypeptide"

SEQ ID NO: 228 - protein, 124 aa, Artificial Sequence
  source: /note="Description of Artificial Sequence: Synthetic polypeptide"
EVQLVESGGGLVQPGRSLRLSCAASGFTFSSYAMHWVRQAPGKGLEWVAVISYDGSNKYYADSVKGRFTISRDNSKNTLYLQMNSLRAEDTAVYYCASSPIGYSYGYWGGMDVWGQGTTVTVSS

SEQ ID NO: 229 - protein, 8 aa, Artificial Sequence
  source: /note="Description of Artificial Sequence: Synthetic peptide"
GFTFSSYA

SEQ ID NO: 230 - protein, 8 aa, Artificial Sequence
  source: /note="Description of Artificial Sequence: Synthetic peptide"
ISYDGSNK

SEQ ID NO: 231 - protein, 17 aa, Artificial Sequence
  source: /note="Description of Artificial Sequence: Synthetic peptide"
ASSPIGYSYGYWGGMDV

SEQ ID NO: 232 - protein, 454 aa, Artificial Sequence
  source: /note="Description of Artificial Sequence: Synthetic polypeptide"
EVQLVESGGGLVQPGRSLRLSCAASGFTFSSYAMHWVRQAPGKGLEWVAVISYDGSNKYYADSVKGRFTISRDNSKNTLYLQMNSLRAEDTAVYYCASSPIGYSYGYWGGMDVWGQGTTVTVSSASTKGPSVFPLAPSSKSTSGGTAALGCLVKDYFPEPVTVSWNSGALTSGVHTFPAVLQSSGLYSLSSVVTVPSSSLGTQTYICNVNHKPSNTKVDKKVEPKSCDKTHTCPPCPAPELLGGPSVFLFPPKPKDTLMISRTPEVTCVVVDVSHEDPEVKFNWYVDGVEVHNAKTKPREEQYNSTYRVVSVLTVLHQDWLNGKEYKCKVSNKALPAPIEKTISKAKGQPREPQVYTLPPSREEMTKNQVSLTCLVKGFYPSDIAVEWESNGQPENNYKTTPPVLDSDGSFFLYSKLTVDKSRWQQGNVFSCSVMHEALHNHYTQKSLSLSPGK

SEQ ID NO: 233 - protein, 116 aa, Artificial Sequence
  source: /note="Description of Artificial Sequence: Synthetic polypeptide"
QAVLTQPASLSASPGASASLTCTLRSGIDVRTNKIFWYQVKPGSPPQHLLTFQSDSDKQQGSGVPSRFSGSKDASANAGILIISGLQSEDEADYYCLIWHTSGWVFGGGTQLTVLG

SEQ ID NO: 234 - protein, 9 aa, Artificial Sequence
  source: /note="Description of Artificial Sequence: Synthetic peptide"
SGIDVRTNK

SEQ ID NO: 235 - protein, 7 aa, Artificial Sequence
  source: /note="Description of Artificial Sequence: Synthetic peptide"
FQSDSDK

SEQ ID NO: 236 - protein, 9 aa, Artificial Sequence
  source: /note="Description of Artificial Sequence: Synthetic peptide"
LIWHTSGWV

SEQ ID NO: 237 - protein, 221 aa, Artificial Sequence
  source: /note="Description of Artificial Sequence: Synthetic polypeptide"
QAVLTQPASLSASPGASASLTCTLRSGIDVRTNKIFWYQVKPGSPPQHLLTFQSDSDKQQGSGVPSRFSGSKDASANAGILIISGLQSEDEADYYCLIWHTSGWVFGGGTQLTVLGQPKAAPSVTLFPPSSEELQANKATLVCLISDFYPGAVTVAWKADSSPVKAGVETTTPSKQSNNKYAASSYLSLTPEQWKSHRSYSCQVTHEGSTVEKTVAPTECS

SEQ ID NO: 238 - protein, 124 aa, Artificial Sequence
  source: /note="Description of Artificial Sequence: Synthetic polypeptide"
EVQLVQSGAEVKKPGASVKVSCKVSGYTLTELSMHWVRQAPGKGLEWMGGFDPEDGETIYAQKFQGRVTMTEDTSTDTAYMELSSLRSEDTAVYYCATGPAAAGVGYYYYMDVWGKGTTVTVSS

SEQ ID NO: 239 - protein, 8 aa, Artificial Sequence
  source: /note="Description of Artificial Sequence: Synthetic peptide"
GYTLTELS

SEQ ID NO: 240 - protein, 8 aa, Artificial Sequence
  source: /note="Description of Artificial Sequence: Synthetic peptide"
FDPEDGET

SEQ ID NO: 241 - protein, 17 aa, Artificial Sequence
  source: /note="Description of Artificial Sequence: Synthetic peptide"
ATGPAAAGVGYYYYMDV

SEQ ID NO: 242 - protein, 454 aa, Artificial Sequence
  source: /note="Description of Artificial Sequence: Synthetic polypeptide"
EVQLVQSGAEVKKPGASVKVSCKVSGYTLTELSMHWVRQAPGKGLEWMGGFDPEDGETIYAQKFQGRVTMTEDTSTDTAYMELSSLRSEDTAVYYCATGPAAAGVGYYYYMDVWGKGTTVTVSSASTKGPSVFPLAPSSKSTSGGTAALGCLVKDYFPEPVTVSWNSGALTSGVHTFPAVLQSSGLYSLSSVVTVPSSSLGTQTYICNVNHKPSNTKVDKKVEPKSCDKTHTCPPCPAPELLGGPSVFLFPPKPKDTLMISRTPEVTCVVVDVSHEDPEVKFNWYVDGVEVHNAKTKPREEQYNSTYRVVSVLTVLHQDWLNGKEYKCKVSNKALPAPIEKTISKAKGQPREPQVYTLPPSREEMTKNQVSLTCLVKGFYPSDIAVEWESNGQPENNYKTTPPVLDSDGSFFLYSKLTVDKSRWQQGNVFSCSVMHEALHNHYTQKSLSLSPGK

SEQ ID NO: 243 - protein, 113 aa, Artificial Sequence
  source: /note="Description of Artificial Sequence: Synthetic polypeptide"
DVVMTQSPLSLPVTPGEPASISCRSSQSLLYRNGYNYLDWYLQKPGQSPQLLIYLGSNRASGVPDRFSGSGSGTDFTLKISRVEAEDVGVYYCMQALQTPPTFGQGTKVEIKR

SEQ ID NO: 244 - protein, 11 aa, Artificial Sequence
  source: /note="Description of Artificial Sequence: Synthetic peptide"
QSLLYRNGYNY

SEQ ID NO: 245 - protein, 3 aa, Artificial Sequence
  source: /note="Description of Artificial Sequence: Synthetic peptide"
LGS

SEQ ID NO: 246 - protein, 9 aa, Artificial Sequence
  source: /note="Description of Artificial Sequence: Synthetic peptide"
MQALQTPPT

SEQ ID NO: 247 - protein, 219 aa, Artificial Sequence
  source: /note="Description of Artificial Sequence: Synthetic polypeptide"
DVVMTQSPLSLPVTPGEPASISCRSSQSLLYRNGYNYLDWYLQKPGQSPQLLIYLGSNRASGVPDRFSGSGSGTDFTLKISRVEAEDVGVYYCMQALQTPPTFGQGTKVEIKRTVAAPSVFIFPPSDEQLKSGTASVVCLLNNFYPREAKVQWKVDNALQSGNSQESVTEQDSKDSTYSLSSTLTLSKADYEKHKVYACEVTHQGLSSPVTKSFNRGEC

SEQ ID NO: 248 - protein, 127 aa, Artificial Sequence
  source: /note="Description of Artificial Sequence: Synthetic polypeptide"
EVQLVETGGGLIQPGRSLRLSCAASGFTFSSYAMHWVRQAPGKGLEWVAVISYDGSNKYYADSVKGRFTISRDNSKNTLYLQMNSLRAEDTAVYYCARDVMVYCSSTSCYFYGMDVWGQGTTVTVSS

SEQ ID NO: 249 - protein, 8 aa, Artificial Sequence
  source: /note="Description of Artificial Sequence: Synthetic peptide"
GFTFSSYA

SEQ ID NO: 250 - protein, 8 aa, Artificial Sequence
  source: /note="Description of Artificial Sequence: Synthetic peptide"
ISYDGSNK

SEQ ID NO: 251 - protein, 20 aa, Artificial Sequence
  source: /note="Description of Artificial Sequence: Synthetic peptide"
ARDVMVYCSSTSCYFYGMDV

SEQ ID NO: 252 - protein, 457 aa, Artificial Sequence
  source: /note="Description of Artificial Sequence: Synthetic polypeptide"
EVQLVETGGGLIQPGRSLRLSCAASGFTFSSYAMHWVRQAPGKGLEWVAVISYDGSNKYYADSVKGRFTISRDNSKNTLYLQMNSLRAEDTAVYYCARDVMVYCSSTSCYFYGMDVWGQGTTVTVSSASTKGPSVFPLAPSSKSTSGGTAALGCLVKDYFPEPVTVSWNSGALTSGVHTFPAVLQSSGLYSLSSVVTVPSSSLGTQTYICNVNHKPSNTKVDKKVEPKSCDKTHTCPPCPAPELLGGPSVFLFPPKPKDTLMISRTPEVTCVVVDVSHEDPEVKFNWYVDGVEVHNAKTKPREEQYNSTYRVVSVLTVLHQDWLNGKEYKCKVSNKALPAPIEKTISKAKGQPREPQVYTLPPSREEMTKNQVSLTCLVKGFYPSDIAVEWESNGQPENNYKTTPPVLDSDGSFFLYSKLTVDKSRWQQGNVFSCSVMHEALHNHYTQKSLSLSPGK

SEQ ID NO: 253 - protein, 108 aa, Artificial Sequence
  source: /note="Description of Artificial Sequence: Synthetic polypeptide"
DIQMTQSPSSLSASVGDRVTVTCQASQDIRDYLNWYQKKPGKAPKLLIYDASNLEAGVPSRFSGSGSGTDFTFTISGLQPEDVATYYCQQFENLPITFGQGTRLEIKR

SEQ ID NO: 254 - protein, 6 aa, Artificial Sequence
  source: /note="Description of Artificial Sequence: Synthetic peptide"
QDIRDY

SEQ ID NO: 255 - protein, 3 aa, Artificial Sequence
  source: /note="Description of Artificial Sequence: Synthetic peptide"
DAS

SEQ ID NO: 256 - protein, 9 aa, Artificial Sequence
  source: /note="Description of Artificial Sequence: Synthetic peptide"
QQFENLPIT

SEQ ID NO: 257 - protein, 214 aa, Artificial Sequence
  source: /note="Description of Artificial Sequence: Synthetic polypeptide"
DIQMTQSPSSLSASVGDRVTVTCQASQDIRDYLNWYQKKPGKAPKLLIYDASNLEAGVPSRFSGSGSGTDFTFTISGLQPEDVATYYCQQFENLPITFGQGTRLEIKRTVAAPSVFIFPPSDEQLKSGTASVVCLLNNFYPREAKVQWKVDNALQSGNSQESVTEQDSKDSTYSLSSTLTLSKADYEKHKVYACEVTHQGLSSPVTKSFNRGEC

SEQ ID NO: 258 - protein, 125 aa, Artificial Sequence
  source: /note="Description of Artificial Sequence: Synthetic polypeptide"
QVQLVQSGAEVKKPGASVKVSCKVSGYTLTELSMHWVRQAPGKGLEWMGGFDPEDGETIYAQKFQGRVTMTEDTSTDTAYMELSSLRSEDTAVYYCATGGYSSGFNYYYYYMDVWGKGTTVTVSS

SEQ ID NO: 259 - protein, 8 aa, Artificial Sequence
  source: /note="Description of Artificial Sequence: Synthetic peptide"
GYTLTELS

SEQ ID NO: 260 - protein, 8 aa, Artificial Sequence
  source: /note="Description of Artificial Sequence: Synthetic peptide"
FDPEDGET

SEQ ID NO: 261 - protein, 18 aa, Artificial Sequence
  source: /note="Description of Artificial Sequence: Synthetic peptide"
ATGGYSSGFNYYYYYMDV

SEQ ID NO: 262 - protein, 455 aa, Artificial Sequence
  source: /note="Description of Artificial Sequence: Synthetic polypeptide"
QVQLVQSGAEVKKPGASVKVSCKVSGYTLTELSMHWVRQAPGKGLEWMGGFDPEDGETIYAQKFQGRVTMTEDTSTDTAYMELSSLRSEDTAVYYCATGGYSSGFNYYYYYMDVWGKGTTVTVSSASTKGPSVFPLAPSSKSTSGGTAALGCLVKDYFPEPVTVSWNSGALTSGVHTFPAVLQSSGLYSLSSVVTVPSSSLGTQTYICNVNHKPSNTKVDKKVEPKSCDKTHTCPPCPAPELLGGPSVFLFPPKPKDTLMISRTPEVTCVVVDVSHEDPEVKFNWYVDGVEVHNAKTKPREEQYNSTYRVVSVLTVLHQDWLNGKEYKCKVSNKALPAPIEKTISKAKGQPREPQVYTLPPSREEMTKNQVSLTCLVKGFYPSDIAVEWESNGQPENNYKTTPPVLDSDGSFFLYSKLTVDKSRWQQGNVFSCSVMHEALHNHYTQKSLSLSPGK

SEQ ID NO: 263 - protein, 113 aa, Artificial Sequence; identical to SEQ ID NO: 193
  source: /note="Description of Artificial Sequence: Synthetic polypeptide"

SEQ ID NO: 264 - protein, 11 aa, Artificial Sequence
  source: /note="Description of Artificial Sequence: Synthetic peptide"
QSLLYRNGNNY

SEQ ID NO: 265 - protein, 3 aa, Artificial Sequence
  source: /note="Description of Artificial Sequence: Synthetic peptide"
LGS

SEQ ID NO: 266 - protein, 9 aa, Artificial Sequence
  source: /note="Description of Artificial Sequence: Synthetic peptide"
MQALQTPPT

SEQ ID NO: 267 - protein, 219 aa, Artificial Sequence; identical to SEQ ID NO: 197
  source: /note="Description of Artificial Sequence: Synthetic polypeptide"

SEQ ID NO: 268 - protein, 121 aa, Artificial Sequence
  source: /note="Description of Artificial Sequence: Synthetic polypeptide"
EVQLVQSGAEVKKPGASVKVSCKVSGYTLTELSMHWVRQAPGKGLEWMGGFDPEDGETIYAQKFQGRVTMTEDTSTDTAYMELSSLRSEDTAVYYCATGVTTYYYYGMDVWGQGTTVTVSS

SEQ ID NO: 269 - protein, 8 aa, Artificial Sequence
  source: /note="Description of Artificial Sequence: Synthetic peptide"
GYTLTELS

SEQ ID NO: 270 - protein, 8 aa, Artificial Sequence
  source: /note="Description of Artificial Sequence: Synthetic peptide"
FDPEDGET

SEQ ID NO: 271 - protein, 14 aa, Artificial Sequence
  source: /note="Description of Artificial Sequence: Synthetic peptide"
ATGVTTYYYYGMDV

SEQ ID NO: 272 - protein, 451 aa, Artificial Sequence
  source: /note="Description of Artificial Sequence: Synthetic polypeptide"
EVQLVQSGAEVKKPGASVKVSCKVSGYTLTELSMHWVRQAPGKGLEWMGGFDPEDGETIYAQKFQGRVTMTEDTSTDTAYMELSSLRSEDTAVYYCATGVTTYYYYGMDVWGQGTTVTVSSASTKGPSVFPLAPSSKSTSGGTAALGCLVKDYFPEPVTVSWNSGALTSGVHTFPAVLQSSGLYSLSSVVTVPSSSLGTQTYICNVNHKPSNTKVDKKVEPKSCDKTHTCPPCPAPELLGGPSVFLFPPKPKDTLMISRTPEVTCVVVDVSHEDPEVKFNWYVDGVEVHNAKTKPREEQYNSTYRVVSVLTVLHQDWLNGKEYKCKVSNKALPAPIEKTISKAKGQPREPQVYTLPPSREEMTKNQVSLTCLVKGFYPSDIAVEWESNGQPENNYKTTPPVLDSDGSFFLYSKLTVDKSRWQQGNVFSCSVMHEALHNHYTQKSLSLSPGK

SEQ ID NO: 273 - protein, 113 aa, Artificial Sequence
  source: /note="Description of Artificial Sequence: Synthetic polypeptide"
DVVMTQSPLSLPVTPGEPASISCRSSQSLLYSNGNNFLDWYLQKPGQSPRLLISLGSNRASGVPDRFSGSGSGTDFTLKISRVEAEDVGIYYCMQALQTPPTFGQGTKVEIKR

SEQ ID NO: 274 - protein, 11 aa, Artificial Sequence
  source: /note="Description of Artificial Sequence: Synthetic peptide"
QSLLYSNGNNF

SEQ ID NO: 275 - protein, 3 aa, Artificial Sequence
  source: /note="Description of Artificial Sequence: Synthetic peptide"
LGS

SEQ ID NO: 276 - protein, 9 aa, Artificial Sequence
  source: /note="Description of Artificial Sequence: Synthetic peptide"
MQALQTPPT

SEQ ID NO: 277 - protein, 219 aa, Artificial Sequence
  source: /note="Description of Artificial Sequence: Synthetic polypeptide"
DVVMTQSPLSLPVTPGEPASISCRSSQSLLYSNGNNFLDWYLQKPGQSPRLLISLGSNRASGVPDRFSGSGSGTDFTLKISRVEAEDVGIYYCMQALQTPPTFGQGTKVEIKRTVAAPSVFIFPPSDEQLKSGTASVVCLLNNFYPREAKVQWKVDNALQSGNSQESVTEQDSKDSTYSLSSTLTLSKADYEKHKVYACEVTHQGLSSPVTKSFNRGEC

SEQ ID NO: 278 - protein, 121 aa, Artificial Sequence
  source: /note="Description of Artificial Sequence: Synthetic polypeptide"
QITLKESGGGVVQPGGSLRLSCAASGFTFSSYGMHWVRQAPGKGLEWVAFIRYDGSNKYYADSVKGRFTISRDNSKNTLYLQMNSLRAEDTAVYYCARDLFDFWWDGMDVWGQGTTVTVSS

SEQ ID NO: 279 - protein, 8 aa, Artificial Sequence
  source: /note="Description of Artificial Sequence: Synthetic peptide"
GFTFSSYG

SEQ ID NO: 280 - protein, 8 aa, Artificial Sequence
  source: /note="Description of Artificial Sequence: Synthetic peptide"
IRYDGSNK

SEQ ID NO: 281 - protein, 14 aa, Artificial Sequence
  source: /note="Description of Artificial Sequence: Synthetic peptide"
ARDLFDFWWDGMDV

SEQ ID NO: 282 - protein, 451 aa, Artificial Sequence
  source: /note="Description of Artificial Sequence: Synthetic polypeptide"
QITLKESGGGVVQPGGSLRLSCAASGFTFSSYGMHWVRQAPGKGLEWVAFIRYDGSNKYYADSVKGRFTISRDNSKNTLYLQMNSLRAEDTAVYYCARDLFDFWWDGMDVWGQGTTVTVSSASTKGPSVFPLAPSSKSTSGGTAALGCLVKDYFPEPVTVSWNSGALTSGVHTFPAVLQSSGLYSLSSVVTVPSSSLGTQTYICNVNHKPSNTKVDKKVEPKSCDKTHTCPPCPAPELLGGPSVFLFPPKPKDTLMISRTPEVTCVVVDVSHEDPEVKFNWYVDGVEVHNAKTKPREEQYNSTYRVVSVLTVLHQDWLNGKEYKCKVSNKALPAPIEKTISKAKGQPREPQVYTLPPSREEMTKNQVSLTCLVKGFYPSDIAVEWESNGQPENNYKTTPPVLDSDGSFFLYSKLTVDKSRWQQGNVFSCSVMHEALHNHYTQKSLSLSPGK

SEQ ID NO: 283 - protein, 110 aa, Artificial Sequence
  source: /note="Description of Artificial Sequence: Synthetic polypeptide"
EIVLTQSPGTLSLSPGEKATLSCRVSQSVSSMYLAWYQQKPGQAPRLLIYGASYRATGIPDRFSGSGSGTDFNLTISRLEPEDFAVYYCQQYVSSPMYTFGLGTKLEIKR

SEQ ID NO: 284 - protein, 7 aa, Artificial Sequence
  source: /note="Description of Artificial Sequence: Synthetic peptide"
QSVSSMY

SEQ ID NO: 285 - protein, 3 aa, Artificial Sequence
  source: /note="Description of Artificial Sequence: Synthetic peptide"
GAS

SEQ ID NO: 286 - protein, 10 aa, Artificial Sequence
  source: /note="Description of Artificial Sequence: Synthetic peptide"
QQYVSSPMYT

SEQ ID NO: 287 - protein, 216 aa, Artificial Sequence
  source: /note="Description of Artificial Sequence: Synthetic polypeptide"
EIVLTQSPGTLSLSPGEKATLSCRVSQSVSSMYLAWYQQKPGQAPRLLIYGASYRATGIPDRFSGSGSGTDFNLTISRLEPEDFAVYYCQQYVSSPMYTFGLGTKLEIKRTVAAPSVFIFPPSDEQLKSGTASVVCLLNNFYPREAKVQWKVDNALQSGNSQESVTEQDSKDSTYSLSSTLTLSKADYEKHKVYACEVTHQGLSSPVTKSFNRGEC

SEQ ID NO: 288 - protein, 122 aa, Artificial Sequence
  source: /note="Description of Artificial Sequence: Synthetic polypeptide"
QVQLVQSGAEVKKPGSSVKVSCKASGGTFNNYGISWVRQAPGKGLEWMGQIIPLFGTTKYAQKFQGRVTIAADEPTSTAYMELGSLRSEDTAIYYCARDRMAADGMAVFDYWGQGTLVTVSS

SEQ ID NO: 289 - protein, 8 aa, Artificial Sequence
  source: /note="Description of Artificial Sequence: Synthetic peptide"
GGTFNNYG

SEQ ID NO: 290 - protein, 8 aa, Artificial Sequence
  source: /note="Description of Artificial Sequence: Synthetic peptide"
IIPLFGTT

SEQ ID NO: 291 - protein, 15 aa, Artificial Sequence
  source: /note="Description of Artificial Sequence: Synthetic peptide"
ARDRMAADGMAVFDY

SEQ ID NO: 292 - protein, 452 aa, Artificial Sequence
  source: /note="Description of Artificial Sequence: Synthetic polypeptide"
QVQLVQSGAEVKKPGSSVKVSCKASGGTFNNYGISWVRQAPGKGLEWMGQIIPLFGTTKYAQKFQGRVTIAADEPTSTAYMELGSLRSEDTAIYYCARDRMAADGMAVFDYWGQGTLVTVSSASTKGPSVFPLAPSSKSTSGGTAALGCLVKDYFPEPVTVSWNSGALTSGVHTFPAVLQSSGLYSLSSVVTVPSSSLGTQTYICNVNHKPSNTKVDKKVEPKSCDKTHTCPPCPAPELLGGPSVFLFPPKPKDTLMISRTPEVTCVVVDVSHEDPEVKFNWYVDGVEVHNAKTKPREEQYNSTYRVVSVLTVLHQDWLNGKEYKCKVSNKALPAPIEKTISKAKGQPREPQVYTLPPSREEMTKNQVSLTCLVKGFYPSDIAVEWESNGQPENNYKTTPPVLDSDGSFFLYSKLTVDKSRWQQGNVFSCSVMHEALHNHYTQKSLSLSPGK

SEQ ID NO: 293 - protein, 111 aa, Artificial Sequence
  source: /note="Description of Artificial Sequence: Synthetic polypeptide"
QSVLTQPPSVSGTPGQKVIISCSGSSSNIGRHFVFWYQQLPGTAPKLLIYKNDERPSGVPDRFSGSKSGTSASLAVSGLRSEDEADYYCSSWDAALNGVVFGGGTKLTVLG

SEQ ID NO: 294 - protein, 8 aa, Artificial Sequence
  source: /note="Description of Artificial Sequence: Synthetic peptide"
SSNIGRHF

SEQ ID NO: 295 - protein, 3 aa, Artificial Sequence
  source: /note="Description of Artificial Sequence: Synthetic peptide"
KND

SEQ ID NO: 296 - protein, 11 aa, Artificial Sequence
  source: /note="Description of Artificial Sequence: Synthetic peptide"
SSWDAALNGVV

SEQ ID NO: 297 - protein, 216 aa, Artificial Sequence
  source: /note="Description of Artificial Sequence: Synthetic polypeptide"
QSVLTQPPSVSGTPGQKVIISCSGSSSNIGRHFVFWYQQLPGTAPKLLIYKNDERPSGVPDRFSGSKSGTSASLAVSGLRSEDEADYYCSSWDAALNGVVFGGGTKLTVLGQPKAAPSVTLFPPSSEELQANKATLVCLISDFYPGAVTVAWKADSSPVKAGVETTTPSKQSNNKYAASSYLSLTPEQWKSHRSYSCQVTHEGSTVEKTVAPTECS

SEQ ID NO: 298 - protein, 126 aa, Artificial Sequence
  source: /note="Description of Artificial Sequence: Synthetic polypeptide"
EVQLVQSGAEVKKPGASVKVSCKVSGYTLTELSMHWVRQAPGKGLEWMGGFDPEDGETIYAQKFQGRVTMTEDTSTDTAYMELSSLRSEDTAVYYCATEVPMVRGARRYYYYMDVWGKGTTVTVSS

SEQ ID NO: 299 - protein, 8 aa, Artificial Sequence
  source: /note="Description of Artificial Sequence: Synthetic peptide"
GYTLTELS

SEQ ID NO: 300 - protein, 8 aa, Artificial Sequence
  source: /note="Description of Artificial Sequence: Synthetic peptide"
FDPEDGET

SEQ ID NO: 301 - protein, 19 aa, Artificial Sequence
  source: /note="Description of Artificial Sequence: Synthetic peptide"
ATEVPMVRGARRYYYYMDV

SEQ ID NO: 302 - protein, 456 aa, Artificial Sequence
  source: /note="Description of Artificial Sequence: Synthetic polypeptide"
EVQLVQSGAEVKKPGASVKVSCKVSGYTLTELSMHWVRQAPGKGLEWMGGFDPEDGETIYAQKFQGRVTMTEDTSTDTAYMELSSLRSEDTAVYYCATEVPMVRGARRYYYYMDVWGKGTTVTVSSASTKGPSVFPLAPSSKSTSGGTAALGCLVKDYFPEPVTVSWNSGALTSGVHTFPAVLQSSGLYSLSSVVTVPSSSLGTQTYICNVNHKPSNTKVDKKVEPKSCDKTHTCPPCPAPELLGGPSVFLFPPKPKDTLMISRTPEVTCVVVDVSHEDPEVKFNWYVDGVEVHNAKTKPREEQYNSTYRVVSVLTVLHQDWLNGKEYKCKVSNKALPAPIEKTISKAKGQPREPQVYTLPPSREEMTKNQVSLTCLVKGFYPSDIAVEWESNGQPENNYKTTPPVLDSDGSFFLYSKLTVDKSRWQQGNVFSCSVMHEALHNHYTQKSLSLSPGK

SEQ ID NO: 303 - protein, 113 aa, Artificial Sequence
  source: /note="Description of Artificial Sequence: Synthetic polypeptide"
DVVMTQSPLFLAVTPGEPASISCRSSQTLLYINENNYLDWYVQKPGQSPQLLIYLGSTRASGVPDRFSGGGSGTDFTLTISRVEAEDVGLYYCMQGLQTPPTFGQGTRLEIKR

SEQ ID NO: 304 - protein, 11 aa, Artificial Sequence
  source: /note="Description of Artificial Sequence: Synthetic peptide"
QTLLYINENNY

SEQ ID NO: 305 - protein, 3 aa, Artificial Sequence
  source: /note="Description of Artificial Sequence: Synthetic peptide"
LGS

SEQ ID NO: 306 - protein, 9 aa, Artificial Sequence
  source: /note="Description of Artificial Sequence: Synthetic peptide"
MQGLQTPPT

SEQ ID NO: 307 - protein, 219 aa, Artificial Sequence
  source: /note="Description of Artificial Sequence: Synthetic polypeptide"
DVVMTQSPLFLAVTPGEPASISCRSSQTLLYINENNYLDWYVQKPGQSPQLLIYLGSTRASGVPDRFSGGGSGTDFTLTISRVEAEDVGLYYCMQGLQTPPTFGQGTRLEIKRTVAAPSVFIFPPSDEQLKSGTASVVCLLNNFYPREAKVQWKVDNALQSGNSQESVTEQDSKDSTYSLSSTLTLSKADYEKHKVYACEVTHQGLSSPVTKSFNRGEC

SEQ ID NO: 308 - protein, 123 aa, Artificial Sequence
  source: /note="Description of Artificial Sequence: Synthetic polypeptide"
QVQLQESGPGLVKSSETLSLTCSVSGGSISNSNYYWGWIRQPPGKGLEWIGGIYYSGSTYYNPSLESRVTISEDTSKNQISLKLSSVTAADTAVYYCARGAWELSLGDWFDPWGPGTLVTVSS

SEQ ID NO: 309 - protein, 10 aa, Artificial Sequence
  source: /note="Description of Artificial Sequence: Synthetic peptide"
GGSISNSNYY

SEQ ID NO: 310 - protein, 7 aa, Artificial Sequence
  source: /note="Description of Artificial Sequence: Synthetic peptide"
IYYSGST

SEQ ID NO: 311 - protein, 15 aa, Artificial Sequence
  source: /note="Description of Artificial Sequence: Synthetic peptide"
ARGAWELSLGDWFDP

SEQ ID NO: 312 - protein, 453 aa, Artificial Sequence
  source: /note="Description of Artificial Sequence: Synthetic polypeptide"
QVQLQESGPGLVKSSETLSLTCSVSGGSISNSNYYWGWIRQPPGKGLEWIGGIYYSGSTYYNPSLESRVTISEDTSKNQISLKLSSVTAADTAVYYCARGAWELSLGDWFDPWGPGTLVTVSSASTKGPSVFPLAPSSKSTSGGTAALGCLVKDYFPEPVTVSWNSGALTSGVHTFPAVLQSSGLYSLSSVVTVPSSSLGTQTYICNVNHKPSNTKVDKKVEPKSCDKTHTCPPCPAPELLGGPSVFLFPPKPKDTLMISRTPEVTCVVVDVSHEDPEVKFNWYVDGVEVHNAKTKPREEQYNSTYRVVSVLTVLHQDWLNGKEYKCKVSNKALPAPIEKTISKAKGQPREPQVYTLPPSREEMTKNQVSLTCLVKGFYPSDIAVEWESNGQPENNYKTTPPVLDSDGSFFLYSKLTVDKSRWQQGNVFSCSVMHEALHNHYTQKSLSLSPGK

SEQ ID NO: 313 - protein, 113 aa, Artificial Sequence
  source: /note="Description of Artificial Sequence: Synthetic polypeptide"
QSVLTQPPSVSGAPGQRVTISCTGSSSNIGAGYDIQWYQQLPGTAPKLLIYGNNNRPSGVPDRFSGSRSGTSASLAITGLQAEDEADYYCQSYDSSLSVYVVFGGGTQLTVLG

SEQ ID NO: 314 - protein, 9 aa, Artificial Sequence
  source: /note="Description of Artificial Sequence: Synthetic peptide"
SSNIGAGYD

SEQ ID NO: 315 - protein, 3 aa, Artificial Sequence
  source: /note="Description of Artificial Sequence: Synthetic peptide"
GNN

SEQ ID NO: 316 - protein, 12 aa, Artificial Sequence
  source: /note="Description of Artificial Sequence: Synthetic peptide"
QSYDSSLSVYVV

SEQ ID NO: 317 - protein, 218 aa, Artificial Sequence
  source: /note="Description of Artificial Sequence: Synthetic polypeptide"
QSVLTQPPSVSGAPGQRVTISCTGSSSNIGAGYDIQWYQQLPGTAPKLLIYGNNNRPSGVPDRFSGSRSGTSASLAITGLQAEDEADYYCQSYDSSLSVYVVFGGGTQLTVLGQPKAAPSVTLFPPSSEELQANKATLVCLISDFYPGAVTVAWKADSSPVKAGVETTTPSKQSNNKYAASSYLSLTPEQWKSHRSYSCQVTHEGSTVEKTVAPTECS

SEQ ID NO: 318 - protein, 122 aa, Artificial Sequence
  source: /note="Description of Artificial Sequence: Synthetic polypeptide"
EVQLVESGGGVVKPGGSLRLSCAASGFTFGTSSMNWVRQAPGKGLEWVAVISFDGTEIHYADSVKGRFTISRDNSKSTVFLQMNSLRPDDTALYYCAKGSGNIYFYSGMDVWGQGTTVTVSS

SEQ ID NO: 319 - protein, 8 aa, Artificial Sequence
  source: /note="Description of Artificial Sequence: Synthetic peptide"
GFTFGTSS

SEQ ID NO: 320 - protein, 8 aa, Artificial Sequence
  source: /note="Description of Artificial Sequence: Synthetic peptide"
ISFDGTEI

SEQ ID NO: 321 - protein, 15 aa, Artificial Sequence
  source: /note="Description of Artificial Sequence: Synthetic peptide"
AKGSGNIYFYSGMDV

SEQ ID NO: 322 - protein, 452 aa, Artificial Sequence
  source: /note="Description of Artificial Sequence: Synthetic polypeptide"
EVQLVESGGGVVKPGGSLRLSCAASGFTFGTSSMNWVRQAPGKGLEWVAVISFDGTEIHYADSVKGRFTISRDNSKSTVFLQMNSLRPDDTALYYCAKGSGNIYFYSGMDVWGQGTTVTVSSASTKGPSVFPLAPSSKSTSGGTAALGCLVKDYFPEPVTVSWNSGALTSGVHTFPAVLQSSGLYSLSSVVTVPSSSLGTQTYICNVNHKPSNTKVDKKVEPKSCDKTHTCPPCPAPELLGGPSVFLFPPKPKDTLMISRTPEVTCVVVDVSHEDPEVKFNWYVDGVEVHNAKTKPREEQYNSTYRVVSVLTVLHQDWLNGKEYKCKVSNKALPAPIEKTISKAKGQPREPQVYTLPPSREEMTKNQVSLTCLVKGFYPSDIAVEWESNGQPENNYKTTPPVLDSDGSFFLYSKLTVDKSRWQQGNVFSCSVMHEALHNHYTQKSLSLSPGK

SEQ ID NO: 323 - protein, 108 aa, Artificial Sequence
  source: /note="Description of Artificial Sequence: Synthetic polypeptide"
DIQMTQSPSTLSASVGDRVTITCRAGQSISGWLAWFQQKPGKAPNLLIYETSTLESGVPSRFSGSGSGTEYTLTISSLQPDDFATYYCQQYYSYPLTFGQGTKVEIKR

SEQ ID NO: 324 - protein, 6 aa, Artificial Sequence
  source: /note="Description of Artificial Sequence: Synthetic peptide"
QSISGW

SEQ ID NO: 325 - protein, 3 aa, Artificial Sequence
  source: /note="Description of Artificial Sequence: Synthetic peptide"
ETS

SEQ ID NO: 326 - protein, 9 aa, Artificial Sequence
  source: /note="Description of Artificial Sequence: Synthetic peptide"
QQYYSYPLT

SEQ ID NO: 327 - protein, 214 aa, Artificial Sequence
  source: /note="Description of Artificial Sequence: Synthetic polypeptide"
DIQMTQSPSTLSASVGDRVTITCRAGQSISGWLAWFQQKPGKAPNLLIYETSTLESGVPSRFSGSGSGTEYTLTISSLQPDDFATYYCQQYYSYPLTFGQGTKVEIKRTVAAPSVFIFPPSDEQLKSGTASVVCLLNNFYPREAKVQWKVDNALQSGNSQESVTEQDSKDSTYSLSSTLTLSKADYEKHKVYACEVTHQGLSSPVTKSFNRGEC

SEQ ID NO: 328 - protein, 126 aa, Artificial Sequence
  source: /note="Description of Artificial Sequence: Synthetic polypeptide"
EVQLVQSGAEVKKPGASVKVSCKVSGYTLTELSMHWVRQAPGKGLEWMGGFDPEDGETIYAQKFQGRVTMTEDTSTDTAYMELSSLRSEDTAVYYCATGVPAAIGVYYYYYYMDVWGKGTTVTVSS

SEQ ID NO: 329 - protein, 8 aa, Artificial Sequence
  source: /note="Description of Artificial Sequence: Synthetic peptide"
GYTLTELS

SEQ ID NO: 330 - protein, 8 aa, Artificial Sequence
  source: /note="Description of Artificial Sequence: Synthetic peptide"
FDPEDGET

SEQ ID NO: 331 - protein, 19 aa, Artificial Sequence
  source: /note="Description of Artificial Sequence: Synthetic peptide"
ATGVPAAIGVYYYYYYMDV

SEQ ID NO: 332 - protein, 456 aa, Artificial Sequence
  source: /note="Description of Artificial Sequence: Synthetic polypeptide"
EVQLVQSGAEVKKPGASVKVSCKVSGYTLTELSMHWVRQAPGKGLEWMGGFDPEDGETIYAQKFQGRVTMTEDTSTDTAYMELSSLRSEDTAVYYCATGVPAAIGVYYYYYYMDVWGKGTTVTVSSASTKGPSVFPLAPSSKSTSGGTAALGCLVKDYFPEPVTVSWNSGALTSGVHTFPAVLQSSGLYSLSSVVTVPSSSLGTQTYICNVNHKPSNTKVDKKVEPKSCDKTHTCPPCPAPELLGGPSVFLFPPKPKDTLMISRTPEVTCVVVDVSHEDPEVKFNWYVDGVEVHNAKTKPREEQYNSTYRVVSVLTVLHQDWLNGKEYKCKVSNKALPAPIEKTISKAKGQPREPQVYTLPPSREEMTKNQVSLTCLVKGFYPSDIAVEWESNGQPENNYKTTPPVLDSDGSFFLYSKLTVDKSRWQQGNVFSCSVMHEALHNHYTQKSLSLSPGK

SEQ ID NO: 333 - protein, 113 aa, Artificial Sequence
  source: /note="Description of Artificial Sequence: Synthetic polypeptide"
DVVMTQSPLSLPVTPGEPASISCRSSQSLLYSNGYNYLDWYLQKPGQSPQLLISLGSNRASGVPDRFSGSGSGTDFTLKISRVEAEDVGVYYCMQALQSPVTFGGGTKVEIKR

SEQ ID NO: 334 - protein, 11 aa, Artificial Sequence
  source: /note="Description of Artificial Sequence: Synthetic peptide"
QSLLYSNGYNY

SEQ ID NO: 335 - protein, 3 aa, Artificial Sequence
  source: /note="Description of Artificial Sequence: Synthetic peptide"
LGS

SEQ ID NO: 336 - protein, 9 aa, Artificial Sequence
  source: /note="Description of Artificial Sequence: Synthetic peptide"
MQALQSPVT

SEQ ID NO: 337 - protein, 219 aa, Artificial Sequence
  source: /note="Description of Artificial Sequence: Synthetic polypeptide"
DVVMTQSPLSLPVTPGEPASISCRSSQSLLYSNGYNYLDWYLQKPGQSPQLLISLGSNRASGVPDRFSGSGSGTDFTLKISRVEAEDVGVYYCMQALQSPVTFGGGTKVEIKRTVAAPSVFIFPPSDEQLKSGTASVVCLLNNFYPREAKVQWKVDNALQSGNSQESVTEQDSKDSTYSLSSTLTLSKADYEKHKVYACEVTHQGLSSPVTKSFNRGEC

SEQ ID NO: 338 - protein, 127 aa, Artificial Sequence
  source: /note="Description of Artificial Sequence: Synthetic polypeptide"
EVQLVQSGAEVKKPGASVKVSCKVSGYTLTELSMHWVRQAPGKGLEWMGGFDPEDGETIYAQKFQGRVTMTEDTSTDTAYMELSSLRSEDTAVYYCATDSRDGPAARGGYYYYMDVWGQGTTVTVSS

SEQ ID NO: 339 - protein, 8 aa, Artificial Sequence
  source: /note="Description of Artificial Sequence: Synthetic peptide"
GYTLTELS

SEQ ID NO: 340 - protein, 8 aa, Artificial Sequence
  source: /note="Description of Artificial Sequence: Synthetic peptide"
FDPEDGET

SEQ ID NO: 341 - protein, 20 aa, Artificial Sequence
  source: /note="Description of Artificial Sequence: Synthetic peptide"
ATDSRDGPAARGGYYYYMDV

SEQ ID NO: 342 - protein, 457 aa, Artificial Sequence
  source: /note="Description of Artificial Sequence: Synthetic polypeptide"
EVQLVQSGAEVKKPGASVKVSCKVSGYTLTELSMHWVRQAPGKGLEWMGGFDPEDGETIYAQKFQGRVTMTEDTSTDTAYMELSSLRSEDTAVYYCATDSRDGPAARGGYYYYMDVWGQGTTVTVSSASTKGPSVFPLAPSSKSTSGGTAALGCLVKDYFPEPVTVSWNSGALTSGVHTFPAVLQSSGLYSLSSVVTVPSSSLGTQTYICNVNHKPSNTKVDKKVEPKSCDKTHTCPPCPAPELLGGPSVFLFPPKPKDTLMISRTPEVTCVVVDVSHEDPEVKFNWYVDGVEVHNAKTKPREEQYNSTYRVVSVLTVLHQDWLNGKEYKCKVSNKALPAPIEKTISKAKGQPREPQVYTLPPSREEMTKNQVSLTCLVKGFYPSDIAVEWESNGQPENNYKTTPPVLDSDGSFFLYSKLTVDKSRWQQGNVFSCSVMHEALHNHYTQKSLSLSPGK

SEQ ID NO: 343 - protein, 113 aa, Artificial Sequence
  source: /note="Description of Artificial Sequence: Synthetic polypeptide"
DVVMTQSPLSLPVTLGQPASISCRSSQSLLYINGYNYLDWYLQKPGQSPQLLIYLGSNRASGVPDRFSGSGSGTDFTLKISRVEAEDVGVYYCMQALQTPPTFGQGTKVEIKR

SEQ ID NO: 344 - protein, 11 aa, Artificial Sequence
  source: /note="Description of Artificial Sequence: Synthetic peptide"
QSLLYINGYNY

SEQ ID NO: 345 - protein, 3 aa, Artificial Sequence
  source: /note="Description of Artificial Sequence: Synthetic peptide"
LGS

SEQ ID NO: 346 - protein, 9 aa, Artificial Sequence
  source: /note="Description of Artificial Sequence: Synthetic peptide"
MQALQTPPT

SEQ ID NO: 347 - protein, 219 aa, Artificial Sequence
  source: /note="Description of Artificial Sequence: Synthetic polypeptide"
DVVMTQSPLSLPVTLGQPASISCRSSQSLLYINGYNYLDWYLQKPGQSPQLLIYLGSNRASGVPDRFSGSGSGTDFTLKISRVEAEDVGVYYCMQALQTPPTFGQGTKVEIKRTVAAPSVFIFPPSDEQLKSGTASVVCLLNNFYPREAKVQWKVDNALQSGNSQESVTEQDSKDSTYSLSSTLTLSKADYEKHKVYACEVTHQGLSSPVTKSFNRGEC

SEQ ID NO: 348 - protein, 127 aa, Artificial Sequence
  source: /note="Description of Artificial Sequence: Synthetic polypeptide"
EVQLVQSGAEVKKPGSSVKVSCKASGGTFSSYAISWVRQAPGQGLEWMGGIIPIFGTANYAQKFQGRVTITADESTSTAYMELSSLRSEDTAVYYCARDAYYYDSSGYYNPDAFDIWGQGTMVTVSS

SEQ ID NO: 349 - protein, 8 aa, Artificial Sequence
  source: /note="Description of Artificial Sequence: Synthetic peptide"
GGTFSSYA

SEQ ID NO: 350 - protein, 8 aa, Artificial Sequence
  source: /note="Description of Artificial Sequence: Synthetic peptide"
IIPIFGTA

SEQ ID NO: 351 - protein, 20 aa, Artificial Sequence
  source: /note="Description of Artificial Sequence: Synthetic peptide"
ARDAYYYDSSGYYNPDAFDI

SEQ ID NO: 352 - protein, 457 aa, Artificial Sequence
  source: /note="Description of Artificial Sequence: Synthetic polypeptide"
EVQLVQSGAEVKKPGSSVKVSCKASGGTFSSYAISWVRQAPGQGLEWMGGIIPIFGTANYAQKFQGRVTITADESTSTAYMELSSLRSEDTAVYYCARDAYYYDSSGYYNPDAFDIWGQGTMVTVSSASTKGPSVFPLAPSSKSTSGGTAALGCLVKDYFPEPVTVSWNSGALTSGVHTFPAVLQSSGLYSLSSVVTVPSSSLGTQTYICNVNHKPSNTKVDKKVEPKSCDKTHTCPPCPAPELLGGPSVFLFPPKPKDTLMISRTPEVTCVVVDVSHEDPEVKFNWYVDGVEVHNAKTKPREEQYNSTYRVVSVLTVLHQDWLNGKEYKCKVSNKALPAPIEKTISKAKGQPREPQVYTLPPSREEMTKNQVSLTCLVKGFYPSDIAVEWESNGQPENNYKTTPPVLDSDGSFFLYSKLTVDKSRWQQGNVFSCSVMHEALHNHYTQKSLSLSPGK

SEQ ID NO: 353 - protein, 113 aa, Artificial Sequence
  source: /note="Description of Artificial Sequence: Synthetic polypeptide"
DVVMTQSPLSLPVTPGEPASISCRSSQSLLHSNGYNYLDWYLQKPGQSPQLLIYLGSSRASGVPDRFSGSVSGTDFTLKISRVEAEDVGVYYCMQGLQTPRTFGRGTKLEIKR

SEQ ID NO: 354 - protein, 11 aa, Artificial Sequence
  source: /note="Description of Artificial Sequence: Synthetic peptide"
QSLLHSNGYNY

SEQ ID NO: 355 - protein, 3 aa, Artificial Sequence
  source: /note="Description of Artificial Sequence: Synthetic peptide"
LGS

SEQ ID NO: 356 - protein, 9 aa, Artificial Sequence
  source: /note="Description of Artificial Sequence: Synthetic peptide"
MQGLQTPRT

SEQ ID NO: 357 - protein, 219 aa, Artificial Sequence
  source: /note="Description of Artificial Sequence: Synthetic polypeptide"
DVVMTQSPLSLPVTPGEPASISCRSSQSLLHSNGYNYLDWYLQKPGQSPQLLIYLGSSRASGVPDRFSGSVSGTDFTLKISRVEAEDVGVYYCMQGLQTPRTFGRGTKLEIKRTVAAPSVFIFPPSDEQLKSGTASVVCLLNNFYPREAKVQWKVDNALQSGNSQESVTEQDSKDSTYSLSSTLTLSKADYEKHKVYACEVTHQGLSSPVTKSFNRGEC

SEQ ID NO: 358 - protein, 129 aa, Artificial Sequence
  source: /note="Description of Artificial Sequence: Synthetic polypeptide"
QVQLVQSGAEVKKPGSSVKVSCKASGGTFSSSAISWVRQAPGQGFEWMGGIIPIYGITDYAQKFQGRVTITTDESTSTAYMELSSLTSEDTAVYYCARDDTARRVRGVPYYYYYAMDVWGQGTTVTVSS

SEQ ID NO: 359 - protein, 8 aa, Artificial Sequence
  source: /note="Description of Artificial Sequence: Synthetic peptide"
GGTFSSSA

SEQ ID NO: 360 - protein, 8 aa, Artificial Sequence
  source: /note="Description of Artificial Sequence: Synthetic peptide"
IIPIYGIT

SEQ ID NO: 361 - protein, 22 aa, Artificial Sequence
  source: /note="Description of Artificial Sequence: Synthetic peptide"
ARDDTARRVRGVPYYYYYAMDV

SEQ ID NO: 362 - protein, 459 aa, Artificial Sequence
  source: /note="Description of Artificial Sequence: Synthetic polypeptide"
QVQLVQSGAEVKKPGSSVKVSCKASGGTFSSSAISWVRQAPGQGFEWMGGIIPIYGITDYAQKFQGRVTITTDESTSTAYMELSSLTSEDTAVYYCARDDTARRVRGVPYYYYYAMDVWGQGTTVTVSSASTKGPSVFPLAPSSKSTSGGTAALGCLVKDYFPEPVTVSWNSGALTSGVHTFPAVLQSSGLYSLSSVVTVPSSSLGTQTYICNVNHKPSNTKVDKKVEPKSCDKTHTCPPCPAPELLGGPSVFLFPPKPKDTLMISRTPEVTCVVVDVSHEDPEVKFNWYVDGVEVHNAKTKPREEQYNSTYRVVSVLTVLHQDWLNGKEYKCKVSNKALPAPIEKTISKAKGQPREPQVYTLPPSREEMTKNQVSLTCLVKGFYPSDIAVEWESNGQPENNYKTTPPVLDSDGSFFLYSKLTVDKSRWQQGNVFSCSVMHEALHNHYTQKSLSLSPGK

SEQ ID NO: 363 - protein, 108 aa, Artificial Sequence
  source: /note="Description of Artificial Sequence: Synthetic polypeptide"
ETTLTQSPAFMSATPGDEVNISCKASQDIDDDVSWYQQKPGGAPIFLIQEASTLVPGIPPRFSGSGFGTDFTLTIKNMESEDAAYYFCLQHDNLPLTFGGGTKVDIKR

SEQ ID NO: 364 - protein, 6 aa, Artificial Sequence
  source: /note="Description of Artificial Sequence: Synthetic peptide"
QDIDDD

SEQ ID NO: 365 - protein, 3 aa, Artificial Sequence
  source: /note="Description of Artificial Sequence: Synthetic peptide"
EAS

SEQ ID NO: 366 - protein, 9 aa, Artificial Sequence
  source: /note="Description of Artificial Sequence: Synthetic peptide"
LQHDNLPLT

SEQ ID NO: 367 - protein, 214 aa, Artificial Sequence
  source: /note="Description of Artificial Sequence: Synthetic polypeptide"
ETTLTQSPAFMSATPGDEVNISCKASQDIDDDVSWYQQKPGGAPIFLIQEASTLVPGIPPRFSGSGFGTDFTLTIKNMESEDAAYYFCLQHDNLPLTFGGGTKVDIKRTVAAPSVFIFPPSDEQLKSGTASVVCLLNNFYPREAKVQWKVDNALQSGNSQESVTEQDSKDSTYSLSSTLTLSKADYEKHKVYACEVTHQGLSSPVTKSFNRGEC

SEQ ID NO: 368 - protein, 126 aa, Artificial Sequence
  source: /note="Description of Artificial Sequence: Synthetic polypeptide"
EVQLVQSGAEVKKPGASVKVSCKVSGYTLTELSMHWVRQAPGKGLEWMGGFDPEDGETIYAQKFQGRVTMTEDTSTDTAYMELSSLRSEDTAVYYCATEDPGPVAGPYYYYGMDVWGQGTTVTVSS

SEQ ID NO: 369 - protein, 8 aa, Artificial Sequence
  source: /note="Description of Artificial Sequence: Synthetic peptide"
GYTLTELS

SEQ ID NO: 370 - protein, 8 aa, Artificial Sequence
  source: /note="Description of Artificial Sequence: Synthetic peptide"
FDPEDGET

SEQ ID NO: 371 - protein, 19 aa, Artificial Sequence
  source: /note="Description of Artificial Sequence: Synthetic peptide"
ATEDPGPVAGPYYYYGMDV

SEQ ID NO: 372 - protein, 456 aa, Artificial Sequence
  source: /note="Description of Artificial Sequence: Synthetic polypeptide"
EVQLVQSGAEVKKPGASVKVSCKVSGYTLTELSMHWVRQAPGKGLEWMGGFDPEDGETIYAQKFQGRVTMTEDTSTDTAYMELSSLRSEDTAVYYCATEDPGPVAGPYYYYGMDVWGQGTTVTVSSASTKGPSVFPLAPSSKSTSGGTAALGCLVKDYFPEPVTVSWNSGALTSGVHTFPAVLQSSGLYSLSSVVTVPSSSLGTQTYICNVNHKPSNTKVDKKVEPKSCDKTHTCPPCPAPELLGGPSVFLFPPKPKDTLMISRTPEVTCVVVDVSHEDPEVKFNWYVDGVEVHNAKTKPREEQYNSTYRVVSVLTVLHQDWLNGKEYKCKVSNKALPAPIEKTISKAKGQPREPQVYTLPPSREEMTKNQVSLTCLVKGFYPSDIAVEWESNGQPENNYKTTPPVLDSDGSFFLYSKLTVDKSRWQQGNVFSCSVMHEALHNHYTQKSLSLSPGK

SEQ ID NO: 373 - protein, 113 aa, Artificial Sequence
  source: /note="Description of Artificial Sequence: Synthetic polypeptide"
DVVMTQSPLVLPVTPGEPASISCRSSQSLLYINGYHYLDWYVQRPGQSPQLLIFLGSTRASGVPDRFSGSGSGTDFTLEISKVEAEDVGIYFCMQALQTPPTFGGGTKVEIKR

SEQ ID NO: 374 - protein, 11 aa, Artificial Sequence
  source: /note="Description of Artificial Sequence: Synthetic peptide"
QSLLYINGYHY

SEQ ID NO: 375 - protein, 3 aa, Artificial Sequence
  source: /note="Description of Artificial Sequence: Synthetic peptide"
LGS

SEQ ID NO: 376 - protein, 9 aa, Artificial Sequence
  source: /note="Description of Artificial Sequence: Synthetic peptide"
MQALQTPPT

SEQ ID NO: 377 - protein, 219 aa, Artificial Sequence
  source: /note="Description of Artificial Sequence: Synthetic polypeptide"
DVVMTQSPLVLPVTPGEPASISCRSSQSLLYINGYHYLDWYVQRPGQSPQLLIFLGSTRASGVPDRFSGSGSGTDFTLEISKVEAEDVGIYFCMQALQTPPTFGGGTKVEIKRTVAAPSVFIFPPSDEQLKSGTASVVCLLNNFYPREAKVQWKVDNALQSGNSQESVTEQDSKDSTYSLSSTLTLSKADYEKHKVYACEVTHQGLSSPVTKSFNRGEC

SEQ ID NO: 378 - protein, 129 aa, Artificial Sequence; identical to SEQ ID NO: 358
  source: /note="Description of Artificial Sequence: Synthetic polypeptide"

SEQ ID NO: 379 - protein, 8 aa, Artificial Sequence
  source: /note="Description of Artificial Sequence: Synthetic peptide"
GGTFSSSA

SEQ ID NO: 380 - protein, 8 aa, Artificial Sequence
  source: /note="Description of Artificial Sequence: Synthetic peptide"
IIPIYGIT

SEQ ID NO: 381 - protein, 22 aa, Artificial Sequence
  source: /note="Description of Artificial Sequence: Synthetic peptide"
ARDDTARRVRGVPYYYYYAMDV

SEQ ID NO: 382 - protein, 459 aa, Artificial Sequence; identical to SEQ ID NO: 362
  source: /note="Description of Artificial Sequence: Synthetic polypeptide"

SEQ ID NO: 383 - protein, 114 aa, Artificial Sequence
  source: /note="Description of Artificial Sequence: Synthetic polypeptide"
DIVMTQTPLSLPVTPGEPASISCRPSQSLLDSDDGNTYLDWYLQKPGQSPQLLIHTLSYRASGVPDRFSGSGSGTDFTLKISRVEAEDVGVYYCMQRLQFPLTFGGGTKVEIKR

SEQ ID NO: 384 - protein, 12 aa, Artificial Sequence
  source: /note="Description of Artificial Sequence: Synthetic peptide"
QSLLDSDDGNTY

SEQ ID NO: 385 - protein, 3 aa, Artificial Sequence
  source: /note="Description of Artificial Sequence: Synthetic peptide"
TLS

SEQ ID NO: 386 - protein, 9 aa, Artificial Sequence
  source: /note="Description of Artificial Sequence: Synthetic peptide"
MQRLQFPLT

SEQ ID NO: 387 - protein, 220 aa, Artificial Sequence
  source: /note="Description of Artificial Sequence: Synthetic polypeptide"
DIVMTQTPLSLPVTPGEPASISCRPSQSLLDSDDGNTYLDWYLQKPGQSPQLLIHTLSYRASGVPDRFSGSGSGTDFTLKISRVEAEDVGVYYCMQRLQFPLTFGGGTKVEIKRTVAAPSVFIFPPSDEQLKSGTASVVCLLNNFYPREAKVQWKVDNALQSGNSQESVTEQDSKDSTYSLSSTLTLSKADYEKHKVYACEVTHQGLSSPVTKSFNRGEC

SEQ ID NO: 388 - protein, 126 aa, Artificial Sequence; identical to SEQ ID NO: 328
  source: /note="Description of Artificial Sequence: Synthetic polypeptide"

SEQ ID NO: 389 - protein, 8 aa, Artificial Sequence
  source: /note="Description of Artificial Sequence: Synthetic peptide"
GYTLTELS

SEQ ID NO: 390 - protein, 8 aa, Artificial Sequence
  source: /note="Description of Artificial Sequence: Synthetic peptide"
FDPEDGET

SEQ ID NO: 391 - protein, 19 aa, Artificial Sequence
  source: /note="Description of Artificial Sequence: Synthetic peptide"
ATGVPAAIGVYYYYYYMDV

SEQ ID NO: 392 - protein, 456 aa, Artificial Sequence; identical to SEQ ID NO: 332
  source: /note="Description of Artificial Sequence: Synthetic polypeptide"

SEQ ID NO: 393 - protein, 113 aa, Artificial Sequence
  source: /note="Description of Artificial Sequence: Synthetic polypeptide"
DVVMTQSPLSLPVTPGEPASISCRSSQSLLYRNGYNYLDWYLQKPGQSPQLLIYWGSYRASGVPDRFSGSGSGTDFTLKISRVEAEDVGVYYCMQAVQNPPTFGQGTKVDIKR

SEQ ID NO: 394 - protein, 11 aa, Artificial Sequence
  source: /note="Description of Artificial Sequence: Synthetic peptide"
QSLLYRNGYNY

SEQ ID NO: 395 - protein, 3 aa, Artificial Sequence
  source: /note="Description of Artificial Sequence: Synthetic peptide"
WGS

SEQ ID NO: 396 - protein, 9 aa, Artificial Sequence
  source: /note="Description of Artificial Sequence: Synthetic peptide"
MQAVQNPPT

SEQ ID NO: 397 - protein, 219 aa, Artificial Sequence
  source: /note="Description of Artificial Sequence: Synthetic polypeptide"
DVVMTQSPLSLPVTPGEPASISCRSSQSLLYRNGYNYLDWYLQKPGQSPQLLIYWGSYRASGVPDRFSGSGSGTDFTLKISRVEAEDVGVYYCMQAVQNPPTFGQGTKVDIKRTVAAPSVFIFPPSDEQLKSGTASVVCLLNNFYPREAKVQWKVDNALQSGNSQESVTEQDSKDSTYSLSSTLTLSKADYEKHKVYACEVTHQGLSSPVTKSFNRGEC

SEQ ID NO: 398 - protein, 129 aa, Artificial Sequence; identical to SEQ ID NO: 358
  source: /note="Description of Artificial Sequence: Synthetic polypeptide"

SEQ ID NO: 399 - protein, 8 aa, Artificial Sequence
  source: /note="Description of Artificial Sequence: Synthetic peptide"
GGTFSSSA

SEQ ID NO: 400 - protein, 8 aa, Artificial Sequence
  source: /note="Description of Artificial Sequence: Synthetic peptide"
IIPIYGIT

SEQ ID NO: 401 - protein, 22 aa, Artificial Sequence
  source: /note="Description of Artificial Sequence: Synthetic peptide"
ARDDTARRVRGVPYYYYYAMDV

SEQ ID NO: 402 - protein, 459 aa, Artificial Sequence; identical to SEQ ID NO: 362
  source: /note="Description of Artificial Sequence: Synthetic polypeptide"

SEQ ID NO: 403 - protein, 109 aa, Artificial Sequence
  source: /note="Description of Artificial Sequence: Synthetic polypeptide"
DVVMTQSPAFLSVTPGERVTLSCKASQTMNNYLAWYQQKPGQAPRLLIYDASTRATDTPPRFSGSGSGTEFTLTISSVQSEDFALYYCQQYGDWLPITFGQGTRLEIKR

SEQ ID NO: 404 - protein, 6 aa, Artificial Sequence
  source: /note="Description of Artificial Sequence: Synthetic peptide"
QTMNNY

SEQ ID NO: 405 - protein, 3 aa, Artificial Sequence
  source: /note="Description of Artificial Sequence: Synthetic peptide"
DAS

SEQ ID NO: 406 - protein, 10 aa, Artificial Sequence
  source: /note="Description of Artificial Sequence: Synthetic peptide"
QQYGDWLPIT

SEQ ID NO: 407 - protein, 215 aa, Artificial Sequence
  source: /note="Description of Artificial Sequence: Synthetic polypeptide"
DVVMTQSPAFLSVTPGERVTLSCKASQTMNNYLAWYQQKPGQAPRLLIYDASTRATDTPPRFSGSGSGTEFTLTISSVQSEDFALYYCQQYGDWLPITFGQGTRLEIKRTVAAPSVFIFPPSDEQLKSGTASVVCLLNNFYPREAKVQWKVDNALQSGNSQESVTEQDSKDSTYSLSSTLTLSKADYEKHKVYACEVTHQGLSSPVTKSFNRGEC

SEQ ID NO: 408 - protein, 124 aa, Artificial Sequence
  source: /note="Description of Artificial Sequence: Synthetic polypeptide"
EVQLVQSGAEVKKPGASVKVSCKVSGYTLTELSMHWVRQAPGKGLEWMGGFDPEDGETIYAQKFQGRVTMTEDTSTDTAYMELSSLRSEDTAVYYCATAFPEATISYYYYMDVWGKGTTVTVSS

SEQ ID NO: 409 - protein, 8 aa, Artificial Sequence
  source: /note="Description of Artificial Sequence: Synthetic peptide"
GYTLTELS

SEQ ID NO: 410 - protein, 8 aa, Artificial Sequence
  source: /note="Description of Artificial Sequence: Synthetic peptide"
FDPEDGET

SEQ ID NO: 411 - protein, 17 aa, Artificial Sequence
  source: /note="Description of Artificial Sequence: Synthetic peptide"
ATAFPEATISYYYYMDV

SEQ ID NO: 412 - protein, 454 aa, Artificial Sequence
  source: /note="Description of Artificial Sequence: Synthetic polypeptide"
EVQLVQSGAEVKKPGASVKVSCKVSGYTLTELSMHWVRQAPGKGLEWMGGFDPEDGETIYAQKFQGRVTMTEDTSTDTAYMELSSLRSEDTAVYYCATAFPEATISYYYYMDVWGKGTTVTVSSASTKGPSVFPLAPSSKSTSGGTAALGCLVKDYFPEPVTVSWNSGALTSGVHTFPAVLQSSGLYSLSSVVTVPSSSLGTQTYICNVNHKPSNTKVDKKVEPKSCDKTHTCPPCPAPELLGGPSVFLFPPKPKDTLMISRTPEVTCVVVDVSHEDPEVKFNWYVDGVEVHNAKTKPREEQYNSTYRVVSVLTVLHQDWLNGKEYKCKVSNKALPAPIEKTISKAKGQPREPQVYTLPPSREEMTKNQVSLTCLVKGFYPSDIAVEWESNGQPENNYKTTPPVLDSDGSFFLYSKLTVDKSRWQQGNVFSCSVMHEALHNHYTQKSLSLSPGK

SEQ ID NO: 413 - protein, 113 aa, Artificial Sequence
  source: /note="Description of Artificial Sequence: Synthetic polypeptide"
DVVMTQSPLSLPVTPGEPASISCRSSQSLLYRNGYNYLDWYLQKPGQSPQLLIYWGSYRASGVPDRFSGSGSGTDFTLKISRVEAEDVGVYYCMQAVQNPPTFGQGTKVEIKR

SEQ ID NO: 414 - protein, 11 aa, Artificial Sequence
  source: /note="Description of Artificial Sequence: Synthetic peptide"
QSLLYRNGYNY

SEQ ID NO: 415 - protein, 3 aa, Artificial Sequence
  source: /note="Description of Artificial Sequence: Synthetic peptide"
WGS

SEQ ID NO: 416 - protein, 9 aa, Artificial Sequence
  source: /note="Description of Artificial Sequence: Synthetic peptide"
MQAVQNPPT

SEQ ID NO: 417 - protein, 219 aa, Artificial Sequence
  source: /note="Description of Artificial Sequence: Synthetic polypeptide"
DVVMTQSPLSLPVTPGEPASISCRSSQSLLYRNGYNYLDWYLQKPGQSPQLLIYWGSYRASGVPDRFSGSGSGTDFTLKISRVEAEDVGVYYCMQAVQNPPTFGQGTKVEIKRTVAAPSVFIFPPSDEQLKSGTASVVCLLNNFYPREAKVQWKVDNALQSGNSQESVTEQDSKDSTYSLSSTLTLSKADYEKHKVYACEVTHQGLSSPVTKSFNRGEC

SEQ ID NO: 418 - protein, 129 aa, Artificial Sequence
  source: /note="Description of Artificial Sequence: Synthetic polypeptide"
QMQLVQSGAEVKKPGSSVKVSCKASGGTFSSSAISWVRQAPGQGFEWMGGIIPIYGITDYAQKFQGRVTITTDESTSTAYMELSSLTSEDTAVYYCARDDTARRVRGVPYYYYYAMDVWGQGTTVTVSS

SEQ ID NO: 419 - protein, 8 aa, Artificial Sequence
  source: /note="Description of Artificial Sequence: Synthetic peptide"
GGTFSSSA

SEQ ID NO: 420 - protein, 8 aa, Artificial Sequence
  source: /note="Description of Artificial Sequence: Synthetic peptide"
IIPIYGIT

SEQ ID NO: 421 - protein, 22 aa, Artificial Sequence
  source: /note="Description of Artificial Sequence: Synthetic peptide"
ARDDTARRVRGVPYYYYYAMDV

SEQ ID NO: 422 - protein, 459 aa, Artificial Sequence
  source: /note="Description of Artificial Sequence: Synthetic polypeptide"
QMQLVQSGAEVKKPGSSVKVSCKASGGTFSSSAISWVRQAPGQGFEWMGGIIPIYGITDYAQKFQGRVTITTDESTSTAYMELSSLTSEDTAVYYCARDDTARRVRGVPYYYYYAMDVWGQGTTVTVSSASTKGPSVFPLAPSSKSTSGGTAALGCLVKDYFPEPVTVSWNSGALTSGVHTFPAVLQSSGLYSLSSVVTVPSSSLGTQTYICNVNHKPSNTKVDKKVEPKSCDKTHTCPPCPAPELLGGPSVFLFPPKPKDTLMISRTPEVTCVVVDVSHEDPEVKFNWYVDGVEVHNAKTKPREEQYNSTYRVVSVLTVLHQDWLNGKEYKCKVSNKALPAPIEKTISKAKGQPREPQVYTLPPSREEMTKNQVSLTCLVKGFYPSDIAVEWESNGQPENNYKTTPPVLDSDGSFFLYSKLTVDKSRWQQGNVFSCSVMHEALHNHYTQKSLSLSPGK

SEQ ID NO: 423 - protein, 114 aa, Artificial Sequence
  source: /note="Description of Artificial Sequence: Synthetic polypeptide"
DIVMTQTPLSLPVTPGEPASMSCRSSRSLLDSDDGNTHLDWYLQKPGQSPQLLIQSLSYRASGVPDRFSGSGSGTDFTLEISRVEAEDVGIYYCMQRKEFPLTFGGGTKVEIKR

SEQ ID NO: 424 - protein, 12 aa, Artificial Sequence
  source: /note="Description of Artificial Sequence: Synthetic peptide"
RSLLDSDDGNTH

SEQ ID NO: 425 - protein, 3 aa, Artificial Sequence
  source: /note="Description of Artificial Sequence: Synthetic peptide"
SLS

SEQ ID NO: 426 - protein, 9 aa, Artificial Sequence
  source: /note="Description of Artificial Sequence: Synthetic peptide"
MQRKEFPLT

SEQ ID NO: 427 - protein, 220 aa, Artificial Sequence
  source: /note="Description of Artificial Sequence: Synthetic polypeptide"
DIVMTQTPLSLPVTPGEPASMSCRSSRSLLDSDDGNTHLDWYLQKPGQSPQLLIQSLSYRASGVPDRFSGSGSGTDFTLEISRVEAEDVGIYYCMQRKEFPLTFGGGTKVEIKRTVAAPSVFIFPPSDEQLKSGTASVVCLLNNFYPREAKVQWKVDNALQSGNSQESVTEQDSKDSTYSLSSTLTLSKADYEKHKVYACEVTHQGLSSPVTKSFNRGEC

SEQ ID NO: 428 - protein, 128 aa, Artificial Sequence
  source: /note="Description of Artificial Sequence: Synthetic polypeptide"
EVQLVQSGAEVKKPGSSVKVSCKASGGTFSSYAISWVRQAPGQGLEWMGGIIPIFGTANYAQKFQGRVTITADKSTSTAYMELSSLRSEDTAVYYCARGPWYYDSSGYSSYAYYMDVWGQGTTVTVSS

SEQ ID NO: 429 - protein, 8 aa, Artificial Sequence
  source: /note="Description of Artificial Sequence: Synthetic peptide"
GGTFSSYA

SEQ ID NO: 430 - protein, 8 aa, Artificial Sequence
  source: /note="Description of Artificial Sequence: Synthetic peptide"
IIPIFGTA

SEQ ID NO: 431 - protein, 21 aa, Artificial Sequence
  source: /note="Description of Artificial Sequence: Synthetic peptide"
ARGPWYYDSSGYSSYAYYMDV

SEQ ID NO: 432 - protein, 458 aa, Artificial Sequence; identical to SEQ ID NO: 182
  source: /note="Description of Artificial Sequence: Synthetic polypeptide"

SEQ ID NO: 433 - protein, 114 aa, Artificial Sequence
  source: /note="Description of Artificial Sequence: Synthetic polypeptide"
DVVMTQSPLSLPVTPGEPASISCRSSQSLLHSDGYNYLDWYLQKPGQSPQLLIYLGSNRASGVPDRFSGSGSGTDFTLKISRVEAEDVGVYYCMQALHTPGVTFGGGTKVEIKR

SEQ ID NO: 434 - protein, 11 aa, Artificial Sequence
  source: /note="Description of Artificial Sequence: Synthetic peptide"
QSLLHSDGYNY

SEQ ID NO: 435 - protein, 3 aa, Artificial Sequence
  source: /note="Description of Artificial Sequence: Synthetic peptide"
LGS

SEQ ID NO: 436 - protein, 10 aa, Artificial Sequence
  source: /note="Description of Artificial Sequence: Synthetic peptide"
MQALHTPGVT

SEQ ID NO: 437 - protein, 220 aa, Artificial Sequence
  source: /note="Description of Artificial Sequence: Synthetic polypeptide"
DVVMTQSPLSLPVTPGEPASISCRSSQSLLHSDGYNYLDWYLQKPGQSPQLLIYLGSNRASGVPDRFSGSGSGTDFTLKISRVEAEDVGVYYCMQALHTPGVTFGGGTKVEIKRTVAAPSVFIFPPSDEQLKSGTASVVCLLNNFYPREAKVQWKVDNALQSGNSQESVTEQDSKDSTYSLSSTLTLSKADYEKHKVYACEVTHQGLSSPVTKSFNRGEC

SEQ ID NO: 438 - protein, 123 aa, Artificial Sequence
  source: /note="Description of Artificial Sequence: Synthetic polypeptide"
QLQLQESGPGLVKPSETLSLTCTVTGGSISSSSYYWAWIRQPPGKGLEWIGGIYYSGSTYYNVSLESRVTISQDTSKNQFSLKLTSVTAADTAVYYCARGAWELRLGDWFDPWGQGTLVTVSS

SEQ ID NO: 439 - protein, 10 aa, Artificial Sequence
  source: /note="Description of Artificial Sequence: Synthetic peptide"
GGSISSSSYY

SEQ ID NO: 440 - protein, 7 aa, Artificial Sequence
  source: /note="Description of Artificial Sequence: Synthetic peptide"
IYYSGST

SEQ ID NO: 441 - protein, 15 aa, Artificial Sequence
  source: /note="Description of Artificial Sequence: Synthetic peptide"
ARGAWELRLGDWFDP

SEQ ID NO: 442 - protein, 453 aa, Artificial Sequence
  source: /note="Description of Artificial Sequence: Synthetic polypeptide"
QLQLQESGPGLVKPSETLSLTCTVTGGSISSSSYYWAWIRQPPGKGLEWIGGIYYSGSTYYNVSLESRVTISQDTSKNQFSLKLTSVTAADTAVYYCARGAWELRLGDWFDPWGQGTLVTVSSASTKGPSVFPLAPSSKSTSGGTAALGCLVKDYFPEPVTVSWNSGALTSGVHTFPAVLQSSGLYSLSSVVTVPSSSLGTQTYICNVNHKPSNTKVDKKVEPKSCDKTHTCPPCPAPELLGGPSVFLFPPKPKDTLMISRTPEVTCVVVDVSHEDPEVKFNWYVDGVEVHNAKTKPREEQYNSTYRVVSVLTVLHQDWLNGKEYKCKVSNKALPAPIEKTISKAKGQPREPQVYTLPPSREEMTKNQVSLTCLVKGFYPSDIAVEWESNGQPENNYKTTPPVLDSDGSFFLYSKLTVDKSRWQQGNVFSCSVMHEALHNHYTQKSLSLSPGK

SEQ ID NO: 443 - protein, 118 aa, Artificial Sequence
  source: /note="Description of Artificial Sequence: Synthetic polypeptide"
QSVLTQPPSVSGAPGQRVTISCTGSSSNIGAGYDIQWYQQLPGTAPKLLIYGYSNRPSGVPDRFSGSKSGTSASLAITGLQAEDEADYYCQSYDSSLSVYVVFGGGTQLTVLGQPKAA

SEQ ID NO: 444 - protein, 9 aa, Artificial Sequence
  source: /note="Description of Artificial Sequence: Synthetic peptide"
SSNIGAGYD

SEQ ID NO: 445 - protein, 3 aa, Artificial Sequence
  source: /note="Description of Artificial Sequence: Synthetic peptide"
GYS

SEQ ID NO: 446 - protein, 12 aa, Artificial Sequence
  source: /note="Description of Artificial Sequence: Synthetic peptide"
QSYDSSLSVYVV

SEQ ID NO: 447 - protein, 218 aa, Artificial Sequence
  source: /note="Description of Artificial Sequence: Synthetic polypeptide"
QSVLTQPPSVSGAPGQRVTISCTGSSSNIGAGYDIQWYQQLPGTAPKLLIYGYSNRPSGVPDRFSGSKSGTSASLAITGLQAEDEADYYCQSYDSSLSVYVVFGGGTQLTVLGQPKAAPSVTLFPPSSEELQANKATLVCLISDFYPGAVTVAWKADSSPVKAGVETTTPSKQSNNKYAASSYLSLTPEQWKSHRSYSCQVTHEGSTVEKTVAPTECS

SEQ ID NO: 448 - protein, 122 aa, Artificial Sequence
  source: /note="Description of Artificial Sequence: Synthetic polypeptide"
QVQLQESGGGVVQPGGSLRLSCAASRFTFEDYAMHWVRQPPGKGLEWVSGISWKSGGINYADSVKGRFTISRDNAQNSLYLQMNSLRAEDTALYYCVKDPTLVATDRAFNIWGQGTMVTVSS

SEQ ID NO: 449 - protein, 8 aa, Artificial Sequence
  source: /note="Description of Artificial Sequence: Synthetic peptide"
RFTFEDYA

SEQ ID NO: 450 - protein, 8 aa, Artificial Sequence
  source: /note="Description of Artificial Sequence: Synthetic peptide"
ISWKSGGI

SEQ ID NO: 451 - protein, 15 aa, Artificial Sequence
  source: /note="Description of Artificial Sequence: Synthetic peptide"
VKDPTLVATDRAFNI

SEQ ID NO: 452 - protein, 452 aa, Artificial Sequence
  source: /note="Description of Artificial Sequence: Synthetic polypeptide"
QVQLQESGGGVVQPGGSLRLSCAASRFTFEDYAMHWVRQPPGKGLEWVSGISWKSGGINYADSVKGRFTISRDNAQNSLYLQMNSLRAEDTALYYCVKDPTLVATDRAFNIWGQGTMVTVSSASTKGPSVFPLAPSSKSTSGGTAALGCLVKDYFPEPVTVSWNSGALTSGVHTFPAVLQSSGLYSLSSVVTVPSSSLGTQTYICNVNHKPSNTKVDKKVEPKSCDKTHTCPPCPAPELLGGPSVFLFPPKPKDTLMISRTPEVTCVVVDVSHEDPEVKFNWYVDGVEVHNAKTKPREEQYNSTYRVVSVLTVLHQDWLNGKEYKCKVSNKALPAPIEKTISKAKGQPREPQVYTLPPSREEMTKNQVSLTCLVKGFYPSDIAVEWESNGQPENNYKTTPPVLDSDGSFFLYSKLTVDKSRWQQGNVFSCSVMHEALHNHYTQKSLSLSPGK

SEQ ID NO: 453 - protein, 117 aa, Artificial Sequence
  source: /note="Description of Artificial Sequence: Synthetic polypeptide"
DVVMTQSPLSLPVTPGEPASISCRSSQSLLHSNGYNYLDWYLQKPGQSPQLLIYLGSNRASGVPDRFSGSGSGTDFTLKISRVEAEDVGVYYCMQYLQTPDTFGQGTKLEIKRAAPS

SEQ ID NO: 454 - protein, 11 aa, Artificial Sequence
  source: /note="Description of Artificial Sequence: Synthetic peptide"
QSLLHSNGYNY

SEQ ID NO: 455 - protein, 3 aa, Artificial Sequence
  source: /note="Description of Artificial Sequence: Synthetic peptide"
LGS

SEQ ID NO: 456 - protein, 9 aa, Artificial Sequence
  source: /note="Description of Artificial Sequence: Synthetic peptide"
MQYLQTPDT

SEQ ID NO: 457 - protein, 219 aa, Artificial Sequence
  source: /note="Description of Artificial Sequence: Synthetic polypeptide"
DVVMTQSPLSLPVTPGEPASISCRSSQSLLHSNGYNYLDWYLQKPGQSPQLLIYLGSNRASGVPDRFSGSGSGTDFTLKISRVEAEDVGVYYCMQYLQTPDTFGQGTKLEIKRTVAAPSVFIFPPSDEQLKSGTASVVCLLNNFYPREAKVQWKVDNALQSGNSQESVTEQDSKDSTYSLSSTLTLSKADYEKHKVYACEVTHQGLSSPVTKSFNRGEC

SEQ ID NO: 458 - protein, 129 aa, Artificial Sequence; identical to SEQ ID NO: 358
  source: /note="Description of Artificial Sequence: Synthetic polypeptide"

SEQ ID NO: 459 - protein, 8 aa, Artificial Sequence
  source: /note="Description of Artificial Sequence: Synthetic peptide"
GGTFSSSA

SEQ ID NO: 460 - protein, 8 aa, Artificial Sequence
  source: /note="Description of Artificial Sequence: Synthetic peptide"
IIPIYGIT

SEQ ID NO: 461 - protein, 22 aa, Artificial Sequence
  source: /note="Description of Artificial Sequence: Synthetic peptide"
ARDDTARRVRGVPYYYYYAMDV

SEQ ID NO: 462 - protein, 459 aa, Artificial Sequence; identical to SEQ ID NO: 362
  source: /note="Description of Artificial Sequence: Synthetic polypeptide"

SEQ ID NO: 463 - protein, 114 aa, Artificial Sequence
  source: /note="Description of Artificial Sequence: Synthetic polypeptide"
EIVLTQSPDFQSVTPKEKVTITCRASQNIDSSLHWYQQKPGQSPKLLINYASQSFSGVPSRFSGSGSGTDFTLTIDSLEPEDAATYFCHQSSSLPLTFGGGTKVEIRRTVAAPS

SEQ ID NO: 464 - protein, 6 aa, Artificial Sequence
  source: /note="Description of Artificial Sequence: Synthetic peptide"
QNIDSS

SEQ ID NO: 465 - protein, 3 aa, Artificial Sequence
  source: /note="Description of Artificial Sequence: Synthetic peptide"
YAS

SEQ ID NO: 466 - protein, 9 aa, Artificial Sequence
  source: /note="Description of Artificial Sequence: Synthetic peptide"
HQSSSLPLT

SEQ ID NO: 467 - protein, 218 aa, Artificial Sequence; identical to SEQ ID NO: 447
  source: /note="Description of Artificial Sequence: Synthetic polypeptide"

SEQ ID NO: 468 - protein, 129 aa, Artificial Sequence
  source: /note="Description of Artificial Sequence: Synthetic polypeptide"
EVQLVQSGAEVKKPGSSVKVSCKTSGGTFSSSAISWVRQAPGQGFEWMGGIIPIYGITDYAQKFQGRVTITTDESTSTAYMELSSLTSEDTAVYYCARDDTARRVRGVPYYYYYAMDVWGQGTTVTVSS

SEQ ID NO: 469 - protein, 8 aa, Artificial Sequence
  source: /note="Description of Artificial Sequence: Synthetic peptide"
GGTFSSSA

SEQ ID NO: 470 - protein, 8 aa, Artificial Sequence
  source: /note="Description of Artificial Sequence: Synthetic peptide"
IIPIYGIT

SEQ ID NO: 471 - protein, 22 aa, Artificial Sequence
  source: /note="Description of Artificial Sequence: Synthetic peptide"
ARDDTARRVRGVPYYYYYAMDV

SEQ ID NO: 472 - protein, 459 aa, Artificial Sequence
  source: /note="Description of Artificial Sequence: Synthetic polypeptide"
EVQLVQSGAEVKKPGSSVKVSCKTSGGTFSSSAISWVRQAPGQGFEWMGGIIPIYGITDYAQKFQGRVTITTDESTSTAYMELSSLTSEDTAVYYCARDDTARRVRGVPYYYYYAMDVWGQGTTVTVSSASTKGPSVFPLAPSSKSTSGGTAALGCLVKDYFPEPVTVSWNSGALTSGVHTFPAVLQSSGLYSLSSVVTVPSSSLGTQTYICNVNHKPSNTKVDKKVEPKSCDKTHTCPPCPAPELLGGPSVFLFPPKPKDTLMISRTPEVTCVVVDVSHEDPEVKFNWYVDGVEVHNAKTKPREEQYNSTYRVVSVLTVLHQDWLNGKEYKCKVSNKALPAPIEKTISKAKGQPREPQVYTLPPSREEMTKNQVSLTCLVKGFYPSDIAVEWESNGQPENNYKTTPPVLDSDGSFFLYSKLTVDKSRWQQGNVFSCSVMHEALHNHYTQKSLSLSPGK

SEQ ID NO: 473 - protein, 114 aa, Artificial Sequence
  source: /note="Description of Artificial Sequence: Synthetic polypeptide"
EIVLTQSPGTLSLSPGERATLSCRASQSVSSYLAWYQQKPGQAPRLLIYDASNRATGIPARFSGSGSGTDFTLTISSLQSEDFAVYYCQQYDDWPQTFGQGTRLEIKRTVAAPS

SEQ ID NO: 474 - protein, 6 aa, Artificial Sequence
  source: /note="Description of Artificial Sequence: Synthetic peptide"
QSVSSY

SEQ ID NO: 475 - protein, 3 aa, Artificial Sequence
  source: /note="Description of Artificial Sequence: Synthetic peptide"
DAS

SEQ ID NO: 476 - protein, 9 aa, Artificial Sequence
  source: /note="Description of Artificial Sequence: Synthetic peptide"
QQYDDWPQT

SEQ ID NO: 477 - protein, 214 aa, Artificial Sequence
  source: /note="Description of Artificial Sequence: Synthetic polypeptide"
EIVLTQSPGTLSLSPGERATLSCRASQSVSSYLAWYQQKPGQAPRLLIYDASNRATGIPARFSGSGSGTDFTLTISSLQSEDFAVYYCQQYDDWPQTFGQGTRLEIKRTVAAPSVFIFPPSDEQLKSGTASVVCLLNNFYPREAKVQWKVDNALQSGNSQESVTEQDSKDSTYSLSSTLTLSKADYEKHKVYACEVTHQGLSSPVTKSFNRGEC

SEQ ID NO: 478 - protein, 129 aa, Artificial Sequence; identical to SEQ ID NO: 418
  source: /note="Description of Artificial Sequence: Synthetic polypeptide"

SEQ ID NO: 479 - protein, 8 aa, Artificial Sequence
  source: /note="Description of Artificial Sequence: Synthetic peptide"
GGTFSSSA

SEQ ID NO: 480 - protein, 8 aa, Artificial Sequence
  source: /note="Description of Artificial Sequence: Synthetic peptide"
IIPIYGIT

SEQ ID NO: 481 - protein, 22 aa, Artificial Sequence
  source: /note="Description of Artificial Sequence: Synthetic peptide"
ARDDTARRVRGVPYYYYYAMDV

SEQ ID NO: 482 - protein, 459 aa, Artificial Sequence; identical to SEQ ID NO: 422
  source: /note="Description of Artificial Sequence: Synthetic polypeptide"

SEQ ID NO: 483 - protein, 114 aa, Artificial Sequence
  source: /note="Description of Artificial Sequence: Synthetic polypeptide"
EIVMTQSPATLSLSTGERATLFCRTSQNVYGEVAWYQQKPGQAPRLLIYDTFERAAGIPAKFSGSGSGTDFTLTISRVEPEDFAVYYCQQRRDWPITFGQGTRLEIKRTVAAPS

SEQ ID NO: 484 - protein, 6 aa, Artificial Sequence
  source: /note="Description of Artificial Sequence: Synthetic peptide"
QNVYGE

SEQ ID NO: 485 - protein, 3 aa, Artificial Sequence
  source: /note="Description of Artificial Sequence: Synthetic peptide"
DTF

SEQ ID NO: 486 - protein, 9 aa, Artificial Sequence
  source: /note="Description of Artificial Sequence: Synthetic peptide"
QQRRDWPIT

SEQ ID NO: 487 - protein, 214 aa, Artificial Sequence
  source: /note="Description of Artificial Sequence: Synthetic polypeptide"
EIVMTQSPATLSLSTGERATLFCRTSQNVYGEVAWYQQKPGQAPRLLIYDTFERAAGIPAKFSGSGSGTDFTLTISRVEPEDFAVYYCQQRRDWPITFGQGTRLEIKRTVAAPSVFIFPPSDEQLKSGTASVVCLLNNFYPREAKVQWKVDNALQSGNSQESVTEQDSKDSTYSLSSTLTLSKADYEKHKVYACEVTHQGLSSPVTKSFNRGEC

SEQ ID NO: 488 - protein, 129 aa, Artificial Sequence; identical to SEQ ID NO: 358
  source: /note="Description of Artificial Sequence: Synthetic polypeptide"

SEQ ID NO: 489 - protein, 8 aa, Artificial Sequence
  source: /note="Description of Artificial Sequence: Synthetic peptide"
GGTFSSSA

SEQ ID NO: 490 - protein, 8 aa, Artificial Sequence
  source: /note="Description of Artificial Sequence: Synthetic peptide"
IIPIYGIT

SEQ ID NO: 491 - protein, 22 aa, Artificial Sequence
  source: /note="Description of Artificial Sequence: Synthetic peptide"
ARDDTARRVRGVPYYYYYAMDV

SEQ ID NO: 492 - protein, 459 aa, Artificial Sequence; identical to SEQ ID NO: 362
  source: /note="Description of Artificial Sequence: Synthetic polypeptide"

SEQ ID NO: 493 - protein, 114 aa, Artificial Sequence
  source: /note="Description of Artificial Sequence: Synthetic polypeptide"
DIQMTQSPSSLSASVGDRVTITCQASRDISDSLSWYQQKPGKAPKLLIFDASNLKTGVSSRFSGSGSGTDFTFTISSLQPEDIATYYCHQYDNLPLTFGGGTKVEIKRTVAAPS

SEQ ID NO: 494 - protein, 6 aa, Artificial Sequence
  source: /note="Description of Artificial Sequence: Synthetic peptide"
RDISDS

SEQ ID NO: 495 - protein, 3 aa, Artificial Sequence
  source: /note="Description of Artificial Sequence: Synthetic peptide"
DAS

SEQ ID NO: 496 - protein, 9 aa, Artificial Sequence
  source: /note="Description of Artificial Sequence: Synthetic peptide"
HQYDNLPLT

SEQ ID NO: 497 - protein, 214 aa, Artificial Sequence
  source: /note="Description of Artificial Sequence: Synthetic polypeptide"
DIQMTQSPSSLSASVGDRVTITCQASRDISDSLSWYQQKPGKAPKLLIFDASNLKTGVSSRFSGSGSGTDFTFTISSLQPEDIATYYCHQYDNLPLTFGGGTKVEIKRTVAAPSVFIFPPSDEQLKSGTASVVCLLNNFYPREAKVQWKVDNALQSGNSQESVTEQDSKDSTYSLSSTLTLSKADYEKHKVYACEVTHQGLSSPVTKSFNRGEC

SEQ ID NO: 498 - protein, 129 aa, Artificial Sequence; identical to SEQ ID NO: 418
  source: /note="Description of Artificial Sequence: Synthetic polypeptide"

SEQ ID NO: 499 - protein, 8 aa, Artificial Sequence
  source: /note="Description of Artificial Sequence: Synthetic peptide"
GGTFSSSA

SEQ ID NO: 500 - protein, 8 aa, Artificial Sequence
  source: /note="Description of Artificial Sequence: Synthetic peptide"
IIPIYGIT

SEQ ID NO: 501 - protein, 22 aa, Artificial Sequence
  source: /note="Description of Artificial Sequence: Synthetic peptide"
ARDDTARRVRGVPYYYYYAMDV

SEQ ID NO: 502 - protein, 459 aa, Artificial Sequence; identical to SEQ ID NO: 422
  source: /note="Description of Artificial Sequence: Synthetic polypeptide"

SEQ ID NO: 503 - protein, 114 aa, Artificial Sequence
  source: /note="Description of Artificial Sequence: Synthetic polypeptide"
EIVMTQSPATLSLSPGERATLSCRASESVTTFLAWYQQKPGQAPRLLITDASNRATGIPGRFSGSGSGTDFTLTISSLEPEDFAVYYCHQHTNWPLTFGGGTKLEIKRTVAAPS

SEQ ID NO: 504 - protein, 6 aa, Artificial Sequence
  source: /note="Description of Artificial Sequence: Synthetic peptide"
ESVTTF

SEQ ID NO: 505 - protein, 3 aa, Artificial Sequence
  source: /note="Description of Artificial Sequence: Synthetic peptide"
DAS

SEQ ID NO: 506 - protein, 9 aa, Artificial Sequence
  source: /note="Description of Artificial Sequence: Synthetic peptide"
HQHTNWPLT

SEQ ID NO: 507 - protein, 214 aa, Artificial Sequence
  source: /note="Description of Artificial Sequence: Synthetic polypeptide"
EIVMTQSPATLSLSPGERATLSCRASESVTTFLAWYQQKPGQAPRLLITDASNRATGIPGRFSGSGSGTDFTLTISSLEPEDFAVYYCHQHTNWPLTFGGGTKLEIKRTVAAPSVFIFPPSDEQLKSGTASVVCLLNNFYPREAKVQWKVDNALQSGNSQESVTEQDSKDSTYSLSSTLTLSKADYEKHKVYACEVTHQGLSSPVTKSFNRGEC

SEQ ID NO: 508 - protein, 129 aa, Artificial Sequence
  source: /note="Description of Artificial Sequence: Synthetic polypeptide"
EVQLVQSGAEVKKPGASVKVSCKVSGYTLTELSMHWVRQAPGKGLEWMGGFDPEDGETIYAQKFQGRVTMTEDTSTDTAYMELSSLRSEDTAVYYCATEVGYCSGGSCYISYYYGMDVWGQGTTVTVSS

SEQ ID NO: 509 - protein, 8 aa, Artificial Sequence
  source: /note="Description of Artificial Sequence: Synthetic peptide"
GYTLTELS

SEQ ID NO: 510 - protein, 8 aa, Artificial Sequence
  source: /note="Description of Artificial Sequence: Synthetic peptide"
FDPEDGET

SEQ ID NO: 511 - protein, 22 aa, Artificial Sequence
  source: /note="Description of Artificial Sequence: Synthetic peptide"
ATEVGYCSGGSCYISYYYGMDV

SEQ ID NO: 512 - protein, 459 aa, Artificial Sequence
  source: /note="Description of Artificial Sequence: Synthetic polypeptide"
EVQLVQSGAEVKKPGASVKVSCKVSGYTLTELSMHWVRQAPGKGLEWMGGFDPEDGETIYAQKFQGRVTMTEDTSTDTAYMELSSLRSEDTAVYYCATEVGYCSGGSCYISYYYGMDVWGQGTTVTVSSASTKGPSVFPLAPSSKSTSGGTAALGCLVKDYFPEPVTVSWNSGALTSGVHTFPAVLQSSGLYSLSSVVTVPSSSLGTQTYICNVNHKPSNTKVDKKVEPKSCDKTHTCPPCPAPELLGGPSVFLFPPKPKDTLMISRTPEVTCVVVDVSHEDPEVKFNWYVDGVEVHNAKTKPREEQYNSTYRVVSVLTVLHQDWLNGKEYKCKVSNKALPAPIEKTISKAKGQPREPQVYTLPPSREEMTKNQVSLTCLVKGFYPSDIAVEWESNGQPENNYKTTPPVLDSDGSFFLYSKLTVDKSRWQQGNVFSCSVMHEALHNHYTQKSLSLSPGK

SEQ ID NO: 513 - protein, 119 aa, Artificial Sequence
  source: /note="Description of Artificial Sequence: Synthetic polypeptide"
DVVMTQSPLSLPVTPGEPASISCRSSQSLLYRNGHNFLDWYVQKPGQSPQLLIYLGSNRASGVPDRFSGSGSGTDFTLKISRVEAEDVGVYYCMQALQTPPTFGQGTKLEIKRTVAAPS

SEQ ID NO: 514 - protein, 11 aa, Artificial Sequence
  source: /note="Description of Artificial Sequence: Synthetic peptide"
QSLLYRNGHNF

SEQ ID NO: 515 - protein, 3 aa, Artificial Sequence
  source: /note="Description of Artificial Sequence: Synthetic peptide"
LGS

SEQ ID NO: 516 - protein, 9 aa, Artificial Sequence
  source: /note="Description of Artificial Sequence: Synthetic peptide"
MQALQTPPT

SEQ ID NO: 517 - protein, 219 aa, Artificial Sequence
  source: /note="Description of Artificial Sequence: Synthetic polypeptide"
DVVMTQSPLSLPVTPGEPASISCRSSQSLLYRNGHNFLDWYVQKPGQSPQLLIYLGSNRASGVPDRFSGSGSGTDFTLKISRVEAEDVGVYYCMQALQTPPTFGQGTKLEIKRTVAAPSVFIFPPSDEQLKSGTASVVCLLNNFYPREAKVQWKVDNALQSGNSQESVTEQDSKDSTYSLSSTLTLSKADYEKHKVYACEVTHQGLSSPVTKSFNRGEC

SEQ ID NO: 518 - protein, 8 aa, Artificial Sequence
  source: /note="Description of Artificial Sequence: Synthetic peptide"
GGTFSSYA

SEQ ID NO: 519 - protein, 8 aa, Artificial Sequence
  source: /note="Description of Artificial Sequence: Synthetic peptide"
IIPIFGTA

SEQ ID NO: 520 - protein, 13 aa, Artificial Sequence
  source: /note="Description of Artificial Sequence: Synthetic peptide"
AREEVSSPYGMDV

SEQ ID NO: 521 - protein, 9 aa, Artificial Sequence
  source: /note="Description of Artificial Sequence: Synthetic peptide"
TGAVTSGHY

SEQ ID NO: 522 - protein, 3 aa, Artificial Sequence
  source: /note="Description of Artificial Sequence: Synthetic peptide"
DTG

SEQ ID NO: 523 - protein, 10 aa, Artificial Sequence
  source: /note="Description of Artificial Sequence: Synthetic peptide"
LLSYSGASWV

SEQ ID NO: 524 - protein, 8 aa, Artificial Sequence
  source: /note="Description of Artificial Sequence: Synthetic peptide"
GGTFSSSA

SEQ ID NO: 525 - protein, 8 aa, Artificial Sequence
  source: /note="Description of Artificial Sequence: Synthetic peptide"
IIPIYGIT

SEQ ID NO: 526 - protein, 22 aa, Artificial Sequence
  source: /note="Description of Artificial Sequence: Synthetic peptide"
ARDDTARRVRGVPYYYYYAMDV

SEQ ID NO: 527 - protein, 6 aa, Artificial Sequence
  source: /note="Description of Artificial Sequence: Synthetic peptide"
QGIGNY

SEQ ID NO: 528 - protein, 3 aa, Artificial Sequence
  source: /note="Description of Artificial Sequence: Synthetic peptide"
SAS

SEQ ID NO: 529 - protein, 9 aa, Artificial Sequence
  source: /note="Description of Artificial Sequence: Synthetic peptide"
QQLKDYPIT

SEQ ID NO: 530 - protein, 8 aa, Artificial Sequence
  source: /note="Description of Artificial Sequence: Synthetic peptide"
GFSLSHFS

SEQ ID NO: 531 - protein, 8 aa, Artificial Sequence
  source: /note="Description of Artificial Sequence: Synthetic peptide"
FDPEEGGT

SEQ ID NO: 532 - protein, 14 aa, Artificial Sequence
  source: /note="Description of Artificial Sequence: Synthetic peptide"
ATGIWYSSGWPVDY

SEQ ID NO: 533 - protein, 11 aa, Artificial Sequence
  source: /note="Description of Artificial Sequence: Synthetic peptide"
QSLLDSSGYNY

SEQ ID NO: 534 - protein, 3 aa, Artificial Sequence
  source: /note="Description of Artificial Sequence: Synthetic peptide"
LGS

SEQ ID NO: 535 - protein, 9 aa, Artificial Sequence
  source: /note="Description of Artificial Sequence: Synthetic peptide"
MQALQTPIT

SEQ ID NO: 536 - protein, 8 aa, Artificial Sequence
  source: /note="Description of Artificial Sequence: Synthetic peptide"
GYTLTELS

SEQ ID NO: 537 - protein, 8 aa, Artificial Sequence
  source: /note="Description of Artificial Sequence: Synthetic peptide"
FDPEDGET

SEQ ID NO: 538 - protein, 18 aa, Artificial Sequence
  source: /note="Description of Artificial Sequence: Synthetic peptide"
ATVSRVRGVINYYYYMDV

SEQ ID NO: 539 - protein, 11 aa, Artificial Sequence
  source: /note="Description of Artificial Sequence: Synthetic peptide"
QSLLYRNGNNY

SEQ ID NO: 540 - protein, 3 aa, Artificial Sequence
  source: /note="Description of Artificial Sequence: Synthetic peptide"
LGS

SEQ ID NO: 541 - protein, 9 aa, Artificial Sequence
  source: /note="Description of Artificial Sequence: Synthetic peptide"
MQALQTPPT

SEQ ID NO: 542 - protein, 8 aa, Artificial Sequence
  source: /note="Description of Artificial Sequence: Synthetic peptide"
GGTFSSSA

SEQ ID NO: 543 - protein, 8 aa, Artificial Sequence
  source: /note="Description of Artificial Sequence: Synthetic peptide"
IIPIYGIT

SEQ ID NO: 544 - protein, 22 aa, Artificial Sequence
  source: /note="Description of Artificial Sequence: Synthetic peptide"
ARDDTARRVRGVPYYYYYAMDV

SEQ ID NO: 545 - protein, 6 aa, Artificial Sequence
  source: /note="Description of Artificial Sequence: Synthetic peptide"
QSVDSS

SEQ ID NO: 546 - protein, 3 aa, Artificial Sequence
  source: /note="Description of Artificial Sequence: Synthetic peptide"
DAS

SEQ ID NO: 547 - protein, 9 aa, Artificial Sequence
  source: /note="Description of Artificial Sequence: Synthetic peptide"
QQYKDWPFT

SEQ ID NO: 548 - protein, 8 aa, Artificial Sequence
  source: /note="Description of Artificial Sequence: Synthetic peptide"
GGTFGTYA

SEQ ID NO: 549 - protein, 8 aa, Artificial Sequence
  source: /note="Description of Artificial Sequence: Synthetic peptide"
ITPISATI

SEQ ID NO: 550 - protein, 13 aa, Artificial Sequence
  source: /note="Description of Artificial Sequence: Synthetic peptide"
ARGFEYSDGLLDD

SEQ ID NO: 551 - protein, 12 aa, Artificial Sequence
  source: /note="Description of Artificial Sequence: Synthetic peptide"
QSLFYSDDGNTY

SEQ ID NO: 552 - protein, 3 aa, Artificial Sequence
  source: /note="Description of Artificial Sequence: Synthetic peptide"
RLS

SEQ ID NO: 553 - protein, 9 aa, Artificial Sequence
  source: /note="Description of Artificial Sequence: Synthetic peptide"
MQHMEFPLT

SEQ ID NO: 554 - protein, 10 aa, Artificial Sequence
  source: /note="Description of Artificial Sequence: Synthetic peptide"
GGSISSSSYY

SEQ ID NO: 555 - protein, 7 aa, Artificial Sequence
  source: /note="Description of Artificial Sequence: Synthetic peptide"
IYYSGST

SEQ ID NO: 556 - protein, 15 aa, Artificial Sequence
  source: /note="Description of Artificial Sequence: Synthetic peptide"
ARGAWELRLGDWFDP

SEQ ID NO: 557 - protein, 9 aa, Artificial Sequence
  source: /note="Description of Artificial Sequence: Synthetic peptide"
SSNIGAGYD

SEQ ID NO: 558 - protein, 3 aa, Artificial Sequence
  source: /note="Description of Artificial Sequence: Synthetic peptide"
GNN

SEQ ID NO: 559 - protein, 12 aa, Artificial Sequence
  source: /note="Description of Artificial Sequence: Synthetic peptide"
QSYDSSLSIYVV

SEQ ID NO: 560 - protein, 9 aa, Artificial Sequence
  source: /note="Description of Artificial Sequence: Synthetic peptide"
SGSISSTNW

SEQ ID NO: 561 - protein, 7 aa, Artificial Sequence
  source: /note="Description of Artificial Sequence: Synthetic peptide"
IYHSGST

SEQ ID NO: 562 - protein, 10 aa, Artificial Sequence
  source: /note="Description of Artificial Sequence: Synthetic peptide"
ARVGPAAIYY

SEQ ID NO: 563 - protein, 8 aa, Artificial Sequence
  source: /note="Description of Artificial Sequence: Synthetic peptide"
SNNVGYEG

SEQ ID NO: 564 - protein, 3 aa, Artificial Sequence
  source: /note="Description of Artificial Sequence: Synthetic peptide"
RNN

SEQ ID NO: 565 - protein, 11 aa, Artificial Sequence
  source: /note="Description of Artificial Sequence: Synthetic peptide"
SAWDSSLNAVV

SEQ ID NO: 566 - protein, 8 aa, Artificial Sequence
  source: /note="Description of Artificial Sequence: Synthetic peptide"
GYTLTELS

SEQ ID NO: 567 - protein, 8 aa, Artificial Sequence
  source: /note="Description of Artificial Sequence: Synthetic peptide"
FDPEDGET

SEQ ID NO: 568 - protein, 21 aa, Artificial Sequence
  source: /note="Description of Artificial Sequence: Synthetic peptide"
ATAKPGIAVAGQNYYYYYMDV

SEQ ID NO: 569 - protein, 11 aa, Artificial Sequence
  source: /note="Description of Artificial Sequence: Synthetic peptide"
QSLLYRNGNNY

SEQ ID NO: 570 - protein, 3 aa, Artificial Sequence
  source: /note="Description of Artificial Sequence: Synthetic peptide"
LGS

SEQ ID NO: 571 - protein, 9 aa, Artificial Sequence
  source: /note="Description of Artificial Sequence: Synthetic peptide"
MQALQTPPT

SEQ ID NO: 572 - protein, 8 aa, Artificial Sequence
  source: /note="Description of Artificial Sequence: Synthetic peptide"
GFTFSSYA

SEQ ID NO: 573 - protein, 8 aa, Artificial Sequence
  source: /note="Description of Artificial Sequence: Synthetic peptide"
ISYDGSNK

SEQ ID NO: 574 - protein, 17 aa, Artificial Sequence
  source: /note="Description of Artificial Sequence: Synthetic peptide"
ASSPIGYSYGYWGGMDV

SEQ ID NO: 575 - protein, 9 aa, Artificial Sequence
  source: /note="Description of Artificial Sequence: Synthetic peptide"
SGIDVRTNK

SEQ ID NO: 576 - protein, 7 aa, Artificial Sequence
  source: /note="Description of Artificial Sequence: Synthetic peptide"
FQSDSDK

SEQ ID NO: 577 - protein, 9 aa, Artificial Sequence
  source: /note="Description of Artificial Sequence: Synthetic peptide"
LIWHTSGWV

SEQ ID NO: 578 - protein, 8 aa, Artificial Sequence
  source: /note="Description of Artificial Sequence: Synthetic peptide"
GYTLTELS

SEQ ID NO: 579 - protein, 8 aa, Artificial Sequence
  source: /note="Description of Artificial Sequence: Synthetic peptide"
FDPEDGET

SEQ ID NO: 580 - protein, 17 aa, Artificial Sequence
  source: /note="Description of Artificial Sequence: Synthetic peptide"
ATGPAAAGVGYYYYMDV

SEQ ID NO: 581 - protein, 11 aa, Artificial Sequence
  source: /note="Description of Artificial Sequence: Synthetic peptide"
QSLLYRNGYNY

SEQ ID NO: 582 - protein, 3 aa, Artificial Sequence
  source: /note="Description of Artificial Sequence: Synthetic peptide"
LGS

SEQ ID NO: 583 - protein, 9 aa, Artificial Sequence
  source: /note="Description of Artificial Sequence: Synthetic peptide"
MQALQTPPT

SEQ ID NO: 584 - protein, 8 aa, Artificial Sequence
  source: /note="Description of Artificial Sequence: Synthetic peptide"
GFTFSSYA

SEQ ID NO: 585 - protein, 8 aa, Artificial Sequence
  source: /note="Description of Artificial Sequence: Synthetic peptide"
ISYDGSNK

SEQ ID NO: 586 - protein, 20 aa, Artificial Sequence
  source: /note="Description of Artificial Sequence: Synthetic peptide"
ARDVMVYCSSTSCYFYGMDV

SEQ ID NO: 587 - protein, 6 aa, Artificial Sequence
  source: /note="Description of Artificial Sequence: Synthetic peptide"
QDIRDY

SEQ ID NO: 588 - protein, 3 aa, Artificial Sequence
  source: /note="Description of Artificial Sequence: Synthetic peptide"
DAS

SEQ ID NO: 589 - protein, 9 aa, Artificial Sequence
  source: /note="Description of Artificial Sequence: Synthetic peptide"
QQFENLPIT

SEQ ID NO: 590 - protein, 8 aa, Artificial Sequence
  source: /note="Description of Artificial Sequence: Synthetic peptide"
GYTLTELS

SEQ ID NO: 591 - protein, 8 aa, Artificial Sequence
  source: /note="Description of Artificial Sequence: Synthetic peptide"
FDPEDGET

SEQ ID NO: 592 - protein, 18 aa, Artificial Sequence
  source: /note="Description of Artificial Sequence: Synthetic peptide"
ATGGYSSGFNYYYYYMDV

SEQ ID NO: 593 - protein, 11 aa, Artificial Sequence
  source: /note="Description of Artificial Sequence: Synthetic peptide"
QSLLYRNGNNY

SEQ ID NO: 594 - protein, 3 aa, Artificial Sequence
  source: /note="Description of Artificial Sequence: Synthetic peptide"
LGS

SEQ ID NO: 595 - protein, 9 aa, Artificial Sequence
  source: /note="Description of Artificial Sequence: Synthetic peptide"
MQALQTPPT

SEQ ID NO: 596 - protein, 8 aa, Artificial Sequence
  source: /note="Description of Artificial Sequence: Synthetic peptide"
GYTLTELS

SEQ ID NO: 597 - protein, 8 aa, Artificial Sequence
  source: /note="Description of Artificial Sequence: Synthetic peptide"
FDPEDGET

SEQ ID NO: 598 - protein, 14 aa, Artificial Sequence
  source: /note="Description of Artificial Sequence: Synthetic peptide"
ATGVTTYYYYGMDV

SEQ ID NO: 599 - protein, 11 aa, Artificial Sequence
  source: /note="Description of Artificial Sequence: Synthetic peptide"
QSLLYSNGNNF

SEQ ID NO: 600 - protein, 3 aa, Artificial Sequence
  source: /note="Description of Artificial Sequence: Synthetic peptide"
LGS

SEQ ID NO: 601 - protein, 9 aa, Artificial Sequence
  source: /note="Description of Artificial Sequence: Synthetic peptide"
MQALQTPPT

SEQ ID NO: 602 - protein, 8 aa, Artificial Sequence
  source: /note="Description of Artificial Sequence: Synthetic peptide"
GFTFSSYG

SEQ ID NO: 603 - protein, 8 aa, Artificial Sequence
  source: /note="Description of Artificial Sequence: Synthetic peptide"
IRYDGSNK

SEQ ID NO: 604 - protein, 14 aa, Artificial Sequence
  source: /note="Description of Artificial Sequence: Synthetic peptide"
ARDLFDFWWDGMDV

SEQ ID NO: 605 - protein, 7 aa, Artificial Sequence
  source: /note="Description of Artificial Sequence: Synthetic peptide"
QSVSSMY

SEQ ID NO: 606 - protein, 3 aa, Artificial Sequence
  source: /note="Description of Artificial Sequence: Synthetic peptide"
GAS

SEQ ID NO: 607 - protein, 10 aa, Artificial Sequence
  source: /note="Description of Artificial Sequence: Synthetic peptide"
QQYVSSPMYT

SEQ ID NO: 608 - protein, 8 aa, Artificial Sequence
  source: /note="Description of Artificial Sequence: Synthetic peptide"
GGTFSSSA

SEQ ID NO: 609 - protein, 8 aa, Artificial Sequence
  source: /note="Description of Artificial Sequence: Synthetic peptide"
IIPIYGIT

SEQ ID NO: 610 - protein, 22 aa, Artificial Sequence
  source: /note="Description of Artificial Sequence: Synthetic peptide"
ARDDTARRVRGVPYYYYYAMDV

SEQ ID NO: 611 - protein, 6 aa, Artificial Sequence
  source: /note="Description of Artificial Sequence: Synthetic peptide"
QSVSSY

SEQ ID NO: 612 - protein, 3 aa, Artificial Sequence
  source: /note="Description of Artificial Sequence: Synthetic peptide"
DAS

SEQ ID NO: 613 - protein, 9 aa, Artificial Sequence
  source: /note="Description of Artificial Sequence: Synthetic peptide"
QQYDDWPQT

SEQ ID NO: 614 - protein, 8 aa, Artificial Sequence
  source: /note="Description of Artificial Sequence: Synthetic peptide"
GGTFNNYG

SEQ ID NO: 615 - protein, 8 aa, Artificial Sequence
  source: /note="Description of Artificial Sequence: Synthetic peptide"
IIPLFGTT

SEQ ID NO: 616 - protein, 15 aa, Artificial Sequence
  source: /note="Description of Artificial Sequence: Synthetic peptide"
ARDRMAADGMAVFDY

SEQ ID NO: 617 - protein, 8 aa, Artificial Sequence
  source: /note="Description of Artificial Sequence: Synthetic peptide"
SSNIGRHF

SEQ ID NO: 618 - protein, 3 aa, Artificial Sequence
  source: /note="Description of Artificial Sequence: Synthetic peptide"
KND

SEQ ID NO: 619 - protein, 11 aa, Artificial Sequence
  source: /note="Description of Artificial Sequence: Synthetic peptide"
SSWDAALNGVV

SEQ ID NO: 620 - protein, 8 aa, Artificial Sequence
  source: /note="Description of Artificial Sequence: Synthetic peptide"
GYTLTELS

SEQ ID NO: 621 - protein, 8 aa, Artificial Sequence
  source: /note="Description of Artificial Sequence: Synthetic peptide"
FDPEDGET

SEQ ID NO: 622 - protein, 19 aa, Artificial Sequence
  source: /note="Description of Artificial Sequence: Synthetic peptide"
ATEVPMVRGARRYYYYMDV

SEQ ID NO: 623 - protein, 11 aa, Artificial Sequence
  source: /note="Description of Artificial Sequence: Synthetic peptide"
QTLLYINENNY

SEQ ID NO: 624 - protein, 3 aa, Artificial Sequence
  source: /note="Description of Artificial Sequence: Synthetic peptide"
LGS

SEQ ID NO: 625 - protein, 9 aa, Artificial Sequence
  source: /note="Description of Artificial Sequence: Synthetic peptide"
MQGLQTPPT

SEQ ID NO: 626 - protein, 10 aa, Artificial Sequence
  source: /note="Description of Artificial Sequence: Synthetic peptide"
GGSISNSNYY

SEQ ID NO: 627 - protein, 7 aa, Artificial Sequence
  source: /note="Description of Artificial Sequence: Synthetic peptide"
IYYSGST

SEQ ID NO: 628 - protein, 15 aa, Artificial Sequence
  source: /note="Description of Artificial Sequence: Synthetic peptide"
ARGAWELSLGDWFDP

SEQ ID NO: 629 - protein, 9 aa, Artificial Sequence
  source: /note="Description of Artificial Sequence: Synthetic peptide"
SSNIGAGYD

SEQ ID NO: 630 - protein, 3 aa, Artificial Sequence
  source: /note="Description of Artificial Sequence: Synthetic peptide"
GNN

SEQ ID NO: 631 - protein, 12 aa, Artificial Sequence
  source: /note="Description of Artificial Sequence: Synthetic peptide"
QSYDSSLSVYVV

SEQ ID NO: 632 - protein, 8 aa, Artificial Sequence
  source: /note="Description of Artificial Sequence: Synthetic peptide"
GGTFSSSA

SEQ ID NO: 633 - protein, 8 aa, Artificial Sequence
  source: /note="Description of Artificial Sequence: Synthetic peptide"
IIPIYGIT

SEQ ID NO: 634 - protein, 22 aa, Artificial Sequence
  source: /note="Description of Artificial Sequence: Synthetic peptide"
ARDDTARRVRGVPYYYYYAMDV

SEQ ID NO: 635 - protein, 6 aa, Artificial Sequence
  source: /note="Description of Artificial Sequence: Synthetic peptide"
QNVYGE

SEQ ID NO: 636 - protein, 3 aa, Artificial Sequence
  source: /note="Description of Artificial Sequence: Synthetic peptide"
DTF

SEQ ID NO: 637 - protein, 9 aa, Artificial Sequence
  source: /note="Description of Artificial Sequence: Synthetic peptide"
QQRRDWPIT

SEQ ID NO: 638 - protein, 8 aa, Artificial Sequence
  source: /note="Description of Artificial Sequence: Synthetic peptide"
GFTFGTSS

SEQ ID NO: 639 - protein, 8 aa, Artificial Sequence
  source: /note="Description of Artificial Sequence: Synthetic peptide"
ISFDGTEI

SEQ ID NO: 640 - protein, 15 aa, Artificial Sequence
  source: /note="Description of Artificial Sequence: Synthetic peptide"
AKGSGNIYFYSGMDV

SEQ ID NO: 641 - protein, 6 aa, Artificial Sequence
  source: /note="Description of Artificial Sequence: Synthetic peptide"
QSISGW

SEQ ID NO: 642 - protein, 3 aa, Artificial Sequence
  source: /note="Description of Artificial Sequence: Synthetic peptide"
ETS

SEQ ID NO: 643 - protein, 9 aa, Artificial Sequence
  source: /note="Description of Artificial Sequence: Synthetic peptide"
QQYYSYPLT

SEQ ID NO: 644 - protein, 8 aa, Artificial Sequence
  source: /note="Description of Artificial Sequence: Synthetic peptide"
GYTLTELS

SEQ ID NO: 645 - protein, 8 aa, Artificial Sequence
  source: /note="Description of Artificial Sequence: Synthetic peptide"
FDPEDGET

SEQ ID NO: 646 - protein, 19 aa, Artificial Sequence
  source: /note="Description of Artificial Sequence: Synthetic peptide"
ATGVPAAIGVYYYYYYMDV

SEQ ID NO: 647 - protein, 11 aa, Artificial Sequence
  source: /note="Description of Artificial Sequence: Synthetic peptide"
QSLLYSNGYNY

SEQ ID NO: 648 - protein, 3 aa, Artificial Sequence
  source: /note="Description of Artificial Sequence: Synthetic peptide"
LGS

SEQ ID NO: 649 - protein, 9 aa, Artificial Sequence
  source: /note="Description of Artificial Sequence: Synthetic peptide"
MQALQSPVT

SEQ ID NO: 650 - protein, 8 aa, Artificial Sequence
  source: /note="Description of Artificial Sequence: Synthetic peptide"
GYTLTELS

SEQ ID NO: 651 - protein, 8 aa, Artificial Sequence
  source: /note="Description of Artificial Sequence: Synthetic peptide"
FDPEDGET

SEQ ID NO: 652 - protein, 20 aa, Artificial Sequence
  source: /note="Description of Artificial Sequence: Synthetic peptide"
ATDSRDGPAARGGYYYYMDV

SEQ ID NO: 653 - protein, 11 aa, Artificial Sequence
  source: /note="Description of Artificial Sequence: Synthetic peptide"
QSLLYINGYNY

SEQ ID NO: 654 - protein, 3 aa, Artificial Sequence
  source: /note="Description of Artificial Sequence: Synthetic peptide"
LGS

SEQ ID NO: 655 - protein, 9 aa, Artificial Sequence
  source: /note="Description of Artificial Sequence: Synthetic peptide"
MQALQTPPT

SEQ ID NO: 656 - protein, 8 aa, Artificial Sequence
  source: /note="Description of Artificial Sequence: Synthetic peptide"
GGTFSSYA

SEQ ID NO: 657 - protein, 8 aa, Artificial Sequence
  source: /note="Description of Artificial Sequence: Synthetic peptide"
IIPIFGTA

SEQ ID NO: 658 - protein, 20 aa, Artificial Sequence
  source: /note="Description of Artificial Sequence: Synthetic peptide"
ARDAYYYDSSGYYNPDAFDI

SEQ ID NO: 659 - protein, 11 aa, Artificial Sequence
  source: /note="Description of Artificial Sequence: Synthetic peptide"
QSLLHSNGYNY

SEQ ID NO: 660 - protein, 3 aa, Artificial Sequence
  source: /note="Description of Artificial Sequence: Synthetic peptide"
LGS

SEQ ID NO: 661 - protein, 9 aa, Artificial Sequence
  source: /note="Description of Artificial Sequence: Synthetic peptide"
MQGLQTPRT

SEQ ID NO: 662 - protein, 10 aa, Artificial Sequence
  source: /note="Description of Artificial Sequence: Synthetic peptide"
GFSLTSGGMS

SEQ ID NO: 663 - protein, 7 aa, Artificial Sequence
  source: /note="Description of Artificial Sequence: Synthetic peptide"
IDWNDDK

SEQ ID NO: 664 - protein, 12 aa, Artificial Sequence
  source: /note="Description of Artificial Sequence: Synthetic peptide"
ARIRGMTWGFDS

SEQ ID NO: 665 - protein, 7 aa, Artificial Sequence
  source: /note="Description of Artificial Sequence: Synthetic peptide"
QSVSSSY

SEQ ID NO: 666 - protein, 3 aa, Artificial Sequence
  source: /note="Description of Artificial Sequence: Synthetic peptide"
GAS

SEQ ID NO: 667 - protein, 9 aa, Artificial Sequence
  source: /note="Description of Artificial Sequence: Synthetic peptide"
QQYGTTPFA

SEQ ID NO: 668 - protein, 8 aa, Artificial Sequence
  source: /note="Description of Artificial Sequence: Synthetic peptide"
GYTFTAYY

SEQ ID NO: 669 - protein, 8 aa, Artificial Sequence
  source: /note="Description of Artificial Sequence: Synthetic peptide"
INPNSGGT

SEQ ID NO: 670 - protein, 21 aa, Artificial Sequence
  source: /note="Description of Artificial Sequence: Synthetic peptide"
ARDGAFYYGSENYYNAGWFDP

SEQ ID NO: 671 - protein, 11 aa, Artificial Sequence
  source: /note="Description of Artificial Sequence: Synthetic peptide"
QSLLSGNGYNY

SEQ ID NO: 672 - protein, 3 aa, Artificial Sequence
  source: /note="Description of Artificial Sequence: Synthetic peptide"
LGS

SEQ ID NO: 673 - protein, 9 aa, Artificial Sequence
  source: /note="Description of Artificial Sequence: Synthetic peptide"
MQALKSPLT

SEQ ID NO: 674 - protein, 8 aa, Artificial Sequence
  source: /note="Description of Artificial Sequence: Synthetic peptide"
GYTFTNYY

SEQ ID NO: 675 - protein, 8 aa, Artificial Sequence
  source: /note="Description of Artificial Sequence: Synthetic peptide"
INPSGGIT

SEQ ID NO: 676 - protein, 18 aa, Artificial Sequence
  source: /note="Description of Artificial Sequence: Synthetic peptide"
ARAGLGYNWNYAPSGMDV

SEQ ID NO: 677 - protein, 9 aa, Artificial Sequence
  source: /note="Description of Artificial Sequence: Synthetic peptide"
SSDVGGYNY

SEQ ID NO: 678 - protein, 3 aa, Artificial Sequence
  source: /note="Description of Artificial Sequence: Synthetic peptide"
EVS

SEQ ID NO: 679 - protein, 10 aa, Artificial Sequence
  source: /note="Description of Artificial Sequence: Synthetic peptide"
SSYAGSNNLV

SEQ ID NO: 680 - protein, 10 aa, Artificial Sequence
  source: /note="Description of Artificial Sequence: Synthetic peptide"
GGSISSSSYY

SEQ ID NO: 681 - protein, 7 aa, Artificial Sequence
  source: /note="Description of Artificial Sequence: Synthetic peptide"
IYYSGST

SEQ ID NO: 682 - protein, 15 aa, Artificial Sequence
  source: /note="Description of Artificial Sequence: Synthetic peptide"
ARGAWELRLGDWFDP

SEQ ID NO: 683 - protein, 9 aa, Artificial Sequence
  source: /note="Description of Artificial Sequence: Synthetic peptide"
SSNIGAGYD

SEQ ID NO: 684 - protein, 3 aa, Artificial Sequence
  source: /note="Description of Artificial Sequence: Synthetic peptide"
GYS

SEQ ID NO: 685 - protein, 12 aa, Artificial Sequence
  source: /note="Description of Artificial Sequence: Synthetic peptide"
QSYDSSLSVYVV

SEQ ID NO: 686 - protein, 8 aa, Artificial Sequence
  source: /note="Description of Artificial Sequence: Synthetic peptide"
GFTFDDYA

SEQ ID NO: 687 - protein, 8 aa, Artificial Sequence
  source: /note="Description of Artificial Sequence: Synthetic peptide"
ISWNSGSI

SEQ ID NO: 688 - protein, 15 aa, Artificial Sequence
  source: /note="Description of Artificial Sequence: Synthetic peptide"
AKDVNRILVAGMVDY

SEQ ID NO: 689 - protein, 11 aa, Artificial Sequence
  source: /note="Description of Artificial Sequence: Synthetic peptide"
QSLLHSNGYNY

SEQ ID NO: 690 - protein, 3 aa, Artificial Sequence
  source: /note="Description of Artificial Sequence: Synthetic peptide"
LGS

SEQ ID NO: 691 - protein, 9 aa, Artificial Sequence
  source: /note="Description of Artificial Sequence: Synthetic peptide"
MQGLQTPIT

SEQ ID NO: 692 - protein, 8 aa, Artificial Sequence
  source: /note="Description of Artificial Sequence: Synthetic peptide"
RFTFEDYA

SEQ ID NO: 693 - protein, 8 aa, Artificial Sequence
  source: /note="Description of Artificial Sequence: Synthetic peptide"
ISWKSGGI

SEQ ID NO: 694 - protein, 15 aa, Artificial Sequence
  source: /note="Description of Artificial Sequence: Synthetic peptide"
VKDPTLVATDRAFNI

SEQ ID NO: 695 - protein, 11 aa, Artificial Sequence
  source: /note="Description of Artificial Sequence: Synthetic peptide"
QSLLHSNGYNY

SEQ ID NO: 696 - protein, 3 aa, Artificial Sequence
  source: /note="Description of Artificial Sequence: Synthetic peptide"
LGS

SEQ ID NO: 697 - protein, 9 aa, Artificial Sequence
  source: /note="Description of Artificial Sequence: Synthetic peptide"
MQYLQTPDT

SEQ ID NO: 698 - protein, 8 aa, Artificial Sequence
  source: /note="Description of Artificial Sequence: Synthetic peptide"
GGTFSSSA

SEQ ID NO: 699 - protein, 8 aa, Artificial Sequence
  source: /note="Description of Artificial Sequence: Synthetic peptide"
IIPIYGIT

SEQ ID NO: 700 - protein, 22 aa, Artificial Sequence
  source: /note="Description of Artificial Sequence: Synthetic peptide"
ARDDTARRVRGVPYYYYYAMDV

SEQ ID NO: 701 - protein, 12 aa, Artificial Sequence
  source: /note="Description of Artificial Sequence: Synthetic peptide"
QSLLDSDDGNIH

SEQ ID NO: 702 - protein, 3 aa, Artificial Sequence
  source: /note="Description of Artificial Sequence: Synthetic peptide"
TLS

SEQ ID NO: 703 - protein, 9 aa, Artificial Sequence
  source: /note="Description of Artificial Sequence: Synthetic peptide"
MQRKEFPLT

SEQ ID NO: 704 - protein, 8 aa, Artificial Sequence
  source: /note="Description of Artificial Sequence: Synthetic peptide"
GFTFSSYG

SEQ ID NO: 705 - protein, 8 aa, Artificial Sequence
  source: /note="Description of Artificial Sequence: Synthetic peptide"
ISYDGSNK

SEQ ID NO: 706 - protein, 18 aa, Artificial Sequence
  source: /note="Description of Artificial Sequence: Synthetic peptide"
AKEDRLRFLEWLFYGMDV

SEQ ID NO: 707 - protein, 6 aa, Artificial Sequence
  source: /note="Description of Artificial Sequence: Synthetic peptide"
HDIYTY

SEQ ID NO: 708 - protein, 3 aa, Artificial Sequence
  source: /note="Description of Artificial Sequence: Synthetic peptide"
DAS

SEQ ID NO: 709 - protein, 11 aa, Artificial Sequence
  source: /note="Description of Artificial Sequence: Synthetic peptide"
QQYDNHPPEVT

SEQ ID NO: 710 - protein, 8 aa, Artificial Sequence
  source: /note="Description of Artificial Sequence: Synthetic peptide"
GGTFSSSA

SEQ ID NO: 711 - protein, 8 aa, Artificial Sequence
  source: /note="Description of Artificial Sequence: Synthetic peptide"
IIPIYGIT

SEQ ID NO: 712 - protein, 22 aa, Artificial Sequence
  source: /note="Description of Artificial Sequence: Synthetic peptide"
ARDDTARRVRGVPYYYYYAMDV

SEQ ID NO: 713 - protein, 6 aa, Artificial Sequence
  source: /note="Description of Artificial Sequence: Synthetic peptide"
QDIDDD

SEQ ID NO: 714 - protein, 3 aa, Artificial Sequence
  source: /note="Description of Artificial Sequence: Synthetic peptide"
EAS

SEQ ID NO: 715 - protein, 9 aa, Artificial Sequence
  source: /note="Description of Artificial Sequence: Synthetic peptide"
LQHDNLPLT

SEQ ID NO: 716 - protein, 8 aa, Artificial Sequence
  source: /note="Description of Artificial Sequence: Synthetic peptide"
GYTLTELS

SEQ ID NO: 717 - protein, 8 aa, Artificial Sequence
  source: /note="Description of Artificial Sequence: Synthetic peptide"
FDPEDGET

SEQ ID NO: 718 - protein, 19 aa, Artificial Sequence
  source: /note="Description of Artificial Sequence: Synthetic peptide"
ATEDPGPVAGPYYYYGMDV

SEQ ID NO: 719 - protein, 11 aa, Artificial Sequence
  source: /note="Description of Artificial Sequence: Synthetic peptide"
QSLLYINGYHY

SEQ ID NO: 720 - protein, 3 aa, Artificial Sequence
  source: /note="Description of Artificial Sequence: Synthetic peptide"
LGS

SEQ ID NO: 721 - protein, 9 aa, Artificial Sequence
  source: /note="Description of Artificial Sequence: Synthetic peptide"
MQALQTPPT

SEQ ID NO: 722 - protein, 8 aa, Artificial Sequence
  source: /note="Description of Artificial Sequence: Synthetic peptide"
GYMFTNYP

SEQ ID NO: 723 - protein, 8 aa, Artificial Sequence
  source: /note="Description of Artificial Sequence: Synthetic peptide"
INAGTGNT

SEQ ID NO: 724 - protein, 21 aa, Artificial Sequence
  source: /note="Description of Artificial Sequence: Synthetic peptide"
AREGMFYYGLESYYKGGWFDP

SEQ ID NO: 725 - protein, 11 aa, Artificial Sequence
  source: /note="Description of Artificial Sequence: Synthetic peptide"
QSLLHRNGYNY

SEQ ID NO: 726 - protein, 3 aa, Artificial Sequence
  source: /note="Description of Artificial Sequence: Synthetic peptide"
LAS

SEQ ID NO: 727 - protein, 9 aa, Artificial Sequence
  source: /note="Description of Artificial Sequence: Synthetic peptide"
MQALQTPLT

SEQ ID NO: 728 - protein, 8 aa, Artificial Sequence
  source: /note="Description of Artificial Sequence: Synthetic peptide"
GGTFSSSA

SEQ ID NO: 729 - protein, 8 aa, Artificial Sequence
  source: /note="Description of Artificial Sequence: Synthetic peptide"
IIPIYGIT

SEQ ID NO: 730 - protein, 22 aa, Artificial Sequence
  source: /note="Description of Artificial Sequence: Synthetic peptide"
ARDDTARRVRGVPYYYYYAMDV

SEQ ID NO: 731 - protein, 12 aa, Artificial Sequence
  source: /note="Description of Artificial Sequence: Synthetic peptide"
QSLLDSDDGNTY

SEQ ID NO: 732 - protein, 3 aa, Artificial Sequence
  source: /note="Description of Artificial Sequence: Synthetic peptide"
TLS

SEQ ID NO: 733 - protein, 9 aa, Artificial Sequence
  source: /note="Description of Artificial Sequence: Synthetic peptide"
MQRLQFPLT

SEQ ID NO: 734 - protein, 8 aa, Artificial Sequence
  source: /note="Description of Artificial Sequence: Synthetic peptide"
TYTFTTYY

SEQ ID NO: 735 - protein, 8 aa, Artificial Sequence
  source: /note="Description of Artificial Sequence: Synthetic peptide"
IYPSGGNT

SEQ ID NO: 736 - protein, 13 aa, Artificial Sequence
  source: /note="Description of Artificial Sequence: Synthetic peptide"
VRDQNYYYSAMDV

SEQ ID NO: 737 - protein, 6 aa, Artificial Sequence
  source: /note="Description of Artificial Sequence: Synthetic peptide"
QDIRNY

SEQ ID NO: 738 - protein, 3 aa, Artificial Sequence
  source: /note="Description of Artificial Sequence: Synthetic peptide"
DAS

SEQ ID NO: 739 - protein, 9 aa, Artificial Sequence
  source: /note="Description of Artificial Sequence: Synthetic peptide"
QQFENLPIT

SEQ ID NO: 740 - protein, 8 aa, Artificial Sequence
  source: /note="Description of Artificial Sequence: Synthetic peptide"
GGTFSSSA

SEQ ID NO: 741 - protein, 8 aa, Artificial Sequence
  source: /note="Description of Artificial Sequence: Synthetic peptide"
IIPIYGIT

SEQ ID NO: 742 - protein, 22 aa, Artificial Sequence
  source: /note="Description of Artificial Sequence: Synthetic peptide"
ARDDTARRVRGVPYYYYYAMDV

SEQ ID NO: 743 - protein, 6 aa, Artificial Sequence
  source: /note="Description of Artificial Sequence: Synthetic peptide"
RDISDS

SEQ ID NO: 744 - protein, 3 aa, Artificial Sequence
  source: /note="Description of Artificial Sequence: Synthetic peptide"
DAS

SEQ ID NO: 745 - protein, 9 aa, Artificial Sequence
  source: /note="Description of Artificial Sequence: Synthetic peptide"
HQYDNLPLT

SEQ ID NO: 746 - protein, 8 aa, Artificial Sequence
  source: /note="Description of Artificial Sequence: Synthetic peptide"
GFNFRGYA

SEQ ID NO: 747 - protein, 8 aa, Artificial Sequence
  source: /note="Description of Artificial Sequence: Synthetic peptide"
ISGSGGTT

SEQ ID NO: 748 - protein, 15 aa, Artificial Sequence
  source: /note="Description of Artificial Sequence: Synthetic peptide"
AQSYAQIGYGGHIDH

SEQ ID NO: 749 - protein, 9 aa, Artificial Sequence
  source: /note="Description of Artificial Sequence: Synthetic peptide"
SGIDVATYM

SEQ ID NO: 750 - protein, 7 aa, Artificial Sequence
  source: /note="Description of Artificial Sequence: Synthetic peptide"
YKSDSDK

SEQ ID NO: 751 - protein, 9 aa, Artificial Sequence
  source: /note="Description of Artificial Sequence: Synthetic peptide"
LIWHGSHYV

SEQ ID NO: 752 - protein, 8 aa, Artificial Sequence
  source: /note="Description of Artificial Sequence: Synthetic peptide"
GYTLTELS

SEQ ID NO: 753 - protein, 8 aa, Artificial Sequence
  source: /note="Description of Artificial Sequence: Synthetic peptide"
FDPEDGET

SEQ ID NO: 754 - protein, 19 aa, Artificial Sequence
  source: /note="Description of Artificial Sequence: Synthetic peptide"
ATGVPAAIGVYYYYYYMDV

SEQ ID NO: 755 - protein, 11 aa, Artificial Sequence
  source: /note="Description of Artificial Sequence: Synthetic peptide"
QSLLYRNGYNY

SEQ ID NO: 756 - protein, 3 aa, Artificial Sequence
  source: /note="Description of Artificial Sequence: Synthetic peptide"
WGS

SEQ ID NO: 757 - protein, 9 aa, Artificial Sequence
  source: /note="Description of Artificial Sequence: Synthetic peptide"
MQAVQNPPT

SEQ ID NO: 758 - protein, 8 aa, Artificial Sequence
  source: /note="Description of Artificial Sequence: Synthetic peptide"
GGTFSSSA

SEQ ID NO: 759 - protein, 8 aa, Artificial Sequence
  source: /note="Description of Artificial Sequence: Synthetic peptide"
IIPIYGIT

SEQ ID NO: 760 - protein, 22 aa, Artificial Sequence
  source: /note="Description of Artificial Sequence: Synthetic peptide"
ARDDTARRVRGVPYYYYYAMDV

SEQ ID NO: 761 - protein, 6 aa, Artificial Sequence
  source: /note="Description of Artificial Sequence: Synthetic peptide"
QNIDSS

SEQ ID NO: 762 - protein, 3 aa, Artificial Sequence
  source: /note="Description of Artificial Sequence: Synthetic peptide"
YAS

SEQ ID NO: 763 - protein, 9 aa, Artificial Sequence
  source: /note="Description of Artificial Sequence: Synthetic peptide"
HQSSSLPLT

SEQ ID NO: 764 - protein, 8 aa, Artificial Sequence
  source: /note="Description of Artificial Sequence: Synthetic peptide"
GGTFSSSA

SEQ ID NO: 765 - protein, 8 aa, Artificial Sequence
  source: /note="Description of Artificial Sequence: Synthetic peptide"
IIPIYGIT

SEQ ID NO: 766 - protein, 22 aa, Artificial Sequence
  source: /note="Description of Artificial Sequence: Synthetic peptide"
ARDDTARRVRGVPYYYYYAMDV

SEQ ID NO: 767 - protein, 7 aa, Artificial Sequence
  source: /note="Description of Artificial Sequence: Synthetic peptide"
QSVYNNY

SEQ ID NO: 768 - protein, 3 aa, Artificial Sequence
  source: /note="Description of Artificial Sequence: Synthetic peptide"
DAS

SEQ ID NO: 769 - protein, 10 aa, Artificial Sequence
  source: /note="Description of Artificial Sequence: Synthetic peptide"
QQYNSWPPYT

SEQ ID NO: 770 - protein, 8 aa, Artificial Sequence
  source: /note="Description of Artificial Sequence: Synthetic peptide"
GGTFSSYA

SEQ ID NO: 771 - protein, 8 aa, Artificial Sequence
  source: /note="Description of Artificial Sequence: Synthetic peptide"
IIPIFGTA

SEQ ID NO: 772 - protein, 20 aa, Artificial Sequence
  source: /note="Description of Artificial Sequence: Synthetic peptide"
ARDAYYYDSSGYYNPDAFDI

SEQ ID NO: 773 - protein, 11 aa, Artificial Sequence
  source: /note="Description of Artificial Sequence: Synthetic peptide"
QSLLYSNGYNY

SEQ ID NO: 774 - protein, 3 aa, Artificial Sequence
  source: /note="Description of Artificial Sequence: Synthetic peptide"
LGS

SEQ ID NO: 775 - protein, 9 aa, Artificial Sequence
  source: /note="Description of Artificial Sequence: Synthetic peptide"
MQARQTPYT

SEQ ID NO: 776 - protein, 8 aa, Artificial Sequence
  source: /note="Description of Artificial Sequence: Synthetic peptide"
GGTFSSSA

SEQ ID NO: 777 - protein, 8 aa, Artificial Sequence
  source: /note="Description of Artificial Sequence: Synthetic peptide"
IIPIYGIT

SEQ ID NO: 778 - protein, 22 aa, Artificial Sequence
  source: /note="Description of Artificial Sequence: Synthetic peptide"
ARDDTARRVRGVPYYYYYAMDV

SEQ ID NO: 779 - protein, 6 aa, Artificial Sequence
  source: /note="Description of Artificial Sequence: Synthetic peptide"
ESVTTF

SEQ ID NO: 780 - protein, 3 aa, Artificial Sequence
  source: /note="Description of Artificial Sequence: Synthetic peptide"
DAS

SEQ ID NO: 781 - protein, 9 aa, Artificial Sequence
  source: /note="Description of Artificial Sequence: Synthetic peptide"
HQHTNWPLT

SEQ ID NO: 782 - protein, 8 aa, Artificial Sequence
  source: /note="Description of Artificial Sequence: Synthetic peptide"
GYTLTELS

SEQ ID NO: 783 - protein, 8 aa, Artificial Sequence
  source: /note="Description of Artificial Sequence: Synthetic peptide"
FDPEDGET

SEQ ID NO: 784 - protein, 22 aa, Artificial Sequence
  source: /note="Description of Artificial Sequence: Synthetic peptide"
ATEVGYCSGGSCYISYYYGMDV

SEQ ID NO: 785 - protein, 11 aa, Artificial Sequence
  source: /note="Description of Artificial Sequence: Synthetic peptide"
QSLLYRNGHNF

SEQ ID NO: 786 - protein, 3 aa, Artificial Sequence
  source: /note="Description of Artificial Sequence: Synthetic peptide"
LGS

SEQ ID NO: 787 - protein, 9 aa, Artificial Sequence
  source: /note="Description of Artificial Sequence: Synthetic peptide"
MQALQTPPT

SEQ ID NO: 788 - protein, 8 aa, Artificial Sequence
  source: /note="Description of Artificial Sequence: Synthetic peptide"
GGTFSSSA

SEQ ID NO: 789 - protein, 8 aa, Artificial Sequence
  source: /note="Description of Artificial Sequence: Synthetic peptide"
IIPIYGIT

SEQ ID NO: 790 - protein, 22 aa, Artificial Sequence
  source: /note="Description of Artificial Sequence: Synthetic peptide"
ARDDTARRVRGVPYYYYYAMDV

SEQ ID NO: 791 - protein, 6 aa, Artificial Sequence
  source: /note="Description of Artificial Sequence: Synthetic peptide"
QTMNNY

SEQ ID NO: 792 - protein, 3 aa, Artificial Sequence
  source: /note="Description of Artificial Sequence: Synthetic peptide"
DAS

SEQ ID NO: 793 - protein, 10 aa, Artificial Sequence
  source: /note="Description of Artificial Sequence: Synthetic peptide"
QQYGDWLPIT

SEQ ID NO: 794 - protein, 8 aa, Artificial Sequence
  source: /note="Description of Artificial Sequence: Synthetic peptide"
GYTLTELS

SEQ ID NO: 795 - protein, 8 aa, Artificial Sequence
  source: /note="Description of Artificial Sequence: Synthetic peptide"
FDPEDGET

SEQ ID NO: 796 - protein, 17 aa, Artificial Sequence
  source: /note="Description of Artificial Sequence: Synthetic peptide"
ATAFPEATISYYYYMDV

SEQ ID NO: 797 - protein, 11 aa, Artificial Sequence
  source: /note="Description of Artificial Sequence: Synthetic peptide"
QSLLYRNGYNY

SEQ ID NO: 798 - protein, 3 aa, Artificial Sequence
  source: /note="Description of Artificial Sequence: Synthetic peptide"
WGS

SEQ ID NO: 799 - protein, 9 aa, Artificial Sequence
  source: /note="Description of Artificial Sequence: Synthetic peptide"
MQAVQNPPT

SEQ ID NO: 800 - protein, 8 aa, Artificial Sequence
  source: /note="Description of Artificial Sequence: Synthetic peptide"
GGTFSSSA

SEQ ID NO: 801 - protein, 8 aa, Artificial Sequence
  source: /note="Description of Artificial Sequence: Synthetic peptide"
IIPIYGIT

SEQ ID NO: 802 - protein, 22 aa, Artificial Sequence
  source: /note="Description of Artificial Sequence: Synthetic peptide"
ARDDTARRVRGVPYYYYYAMDV

SEQ ID NO: 803 - protein, 12 aa, Artificial Sequence
  source: /note="Description of Artificial Sequence: Synthetic peptide"
RSLLDSDDGNTH

SEQ ID NO: 804 - protein, 3 aa, Artificial Sequence
  source: /note="Description of Artificial Sequence: Synthetic peptide"
SLS

SEQ ID NO: 805 - protein, 9 aa, Artificial Sequence
  source: /note="Description of Artificial Sequence: Synthetic peptide"
MQRKEFPLT

SEQ ID NO: 806 - protein, 8 aa, Artificial Sequence
  source: /note="Description of Artificial Sequence: Synthetic peptide"
GGTFSSYA

SEQ ID NO: 807 - protein, 8 aa, Artificial Sequence
  source: /note="Description of Artificial Sequence: Synthetic peptide"
IIPIFGTA

SEQ ID NO: 808 - protein, 21 aa, Artificial Sequence
  source: /note="Description of Artificial Sequence: Synthetic peptide"
ARGPWYYDSSGYSSYAYYMDV

SEQ ID NO: 809 - protein, 11 aa, Artificial Sequence
  source: /note="Description of Artificial Sequence: Synthetic peptide"
QSLLHSDGYNY

SEQ ID NO: 810 - protein, 3 aa, Artificial Sequence
  source: /note="Description of Artificial Sequence: Synthetic peptide"
LGS

SEQ ID NO: 811 - protein, 10 aa, Artificial Sequence
  source: /note="Description of Artificial Sequence: Synthetic peptide"
MQALHTPGVT

SEQ ID NO: 812 - protein, 121 aa, Artificial Sequence
  source: /note="Description of Artificial Sequence: Synthetic polypeptide"
DVQLVESGGDLVQPGGSRKLSCTASGFTFSNFGMHWVRQAPEKGLEWVAYISSGSSTIYYADTVKGRFTISRDNPENTLFLQMTSLRSEDTAMYYCTRLDYYTNSYSMDHWGQGTSVTVSS

SEQ ID NO: 813 - protein, 8 aa, Artificial Sequence
  source: /note="Description of Artificial Sequence: Synthetic peptide"
GFTFSNFG

SEQ ID NO: 814 - protein, 8 aa, Artificial Sequence
  source: /note="Description of Artificial Sequence: Synthetic peptide"
ISSGSSTI

SEQ ID NO: 815 - protein, 14 aa, Artificial Sequence
  source: /note="Description of Artificial Sequence: Synthetic peptide"
TRLDYYTNSYSMDH

SEQ ID NO: 816 - protein, 106 aa, Artificial Sequence
  source: /note="Description of Artificial Sequence: Synthetic polypeptide"
QIVLTQSPALMSASPGEKVTLTCSASSSLPYIYWYQQKPGSSPKPWIYLTSNLASGVPARFSGSRSGTSYSLTISSVEAEDAATYYCQQWSSNPFTFGSGTKLEIK

SEQ ID NO: 817 - protein, 5 aa, Artificial Sequence
  source: /note="Description of Artificial Sequence: Synthetic peptide"
SSLPY

SEQ ID NO: 818 - protein, 3 aa, Artificial Sequence
  source: /note="Description of Artificial Sequence: Synthetic peptide"
LTS

SEQ ID NO: 819 - protein, 9 aa, Artificial Sequence
  source: /note="Description of Artificial Sequence: Synthetic peptide"
QQWSSNPFT

SEQ ID NO: 820 - protein, 117 aa, Artificial Sequence
  source: /note="Description of Artificial Sequence: Synthetic polypeptide"
QVQLQQSGAELAKPGASVKMSCKASGYTFTSNWMHWVKQRPGQGLEWIGYINPSNGYTECNQKFRDKATLSADKSSSTAYMQLNSLTSADSAVYYCALMISAWLPYWGQGTLVTVSA

SEQ ID NO: 821 - protein, 8 aa, Artificial Sequence
  source: /note="Description of Artificial Sequence: Synthetic peptide"
GYTFTSNW

SEQ ID NO: 822 - protein, 8 aa, Artificial Sequence
  source: /note="Description of Artificial Sequence: Synthetic peptide"
INPSNGYT

SEQ ID NO: 823 - protein, 10 aa, Artificial Sequence
  source: /note="Description of Artificial Sequence: Synthetic peptide"
ALMISAWLPY

SEQ ID NO: 824 - protein, 111 aa, Artificial Sequence
  source: /note="Description of Artificial Sequence: Synthetic polypeptide"
DIVLTQSPASLAISLGQRATISCRASQSVSASSYSYVHWYQQKPGQPPKLLIKYASSLESGVPARFSGSGSGTDFTLNIHPVEEEDTATYYCLHTWEIPYTFGGGTKLEIK

SEQ ID NO: 825 - protein, 10 aa, Artificial Sequence
  source: /note="Description of Artificial Sequence: Synthetic peptide"
QSVSASSYSY

SEQ ID NO: 826 - protein, 3 aa, Artificial Sequence
  source: /note="Description of Artificial Sequence: Synthetic peptide"
YAS

SEQ ID NO: 827 - protein, 9 aa, Artificial Sequence
  source: /note="Description of Artificial Sequence: Synthetic peptide"
LHTWEIPYT

SEQ ID NO: 828 - protein, 116 aa, Artificial Sequence
  source: /note="Description of Artificial Sequence: Synthetic polypeptide"
QVQLQQSGAELTRPGASVNLSCKASGYTFTSYWMQWVKQRPGQGLEWIGAIYPGDGDTRFNQKFKGKATLTADESSSTAYMQLSSLASEDSAVYYCATYYRYDDYWGQGTTLTVSS

SEQ ID NO: 829 - protein, 8 aa, Artificial Sequence
  source: /note="Description of Artificial Sequence: Synthetic peptide"
GYTFTSYW

SEQ ID NO: 830 - protein, 8 aa, Artificial Sequence
  source: /note="Description of Artificial Sequence: Synthetic peptide"
IYPGDGDT

SEQ ID NO: 831 - protein, 9 aa, Artificial Sequence
  source: /note="Description of Artificial Sequence: Synthetic peptide"
ATYYRYDDY

SEQ ID NO: 832 - protein, 106 aa, Artificial Sequence
  source: /note="Description of Artificial Sequence: Synthetic polypeptide"
QIVLTQSPAIMSASPGEKVTMTCSASSSVSYMHWYQQKSGTSPKRWIYDTSKLASGVPTRFSGSGSGTSYSLTISSMEAEDAATYYCQQWSSNPYTFGGGTKLEIK

SEQ ID NO: 833 - protein, 5 aa, Artificial Sequence
  source: /note="Description of Artificial Sequence: Synthetic peptide"
SSVSY

SEQ ID NO: 834 - protein, 3 aa, Artificial Sequence
  source: /note="Description of Artificial Sequence: Synthetic peptide"
DTS

SEQ ID NO: 835 - protein, 9 aa, Artificial Sequence
  source: /note="Description of Artificial Sequence: Synthetic peptide"
QQWSSNPYT

SEQ ID NO: 836 - protein, 122 aa, Artificial Sequence
  source: /note="Description of Artificial Sequence: Synthetic polypeptide"
EVQLQQSGPDLVKPGASMKISCKASGYTFIDYNIHWVKQSQGKSLDWIGYIYPYNGGTGYNQKFKNKATLTVDSSSSTAYMEVRSLTFEDSAVYFCAREADYYGNRGQFDYWGQGTLVTVSA

SEQ ID NO: 837 - protein, 8 aa, Artificial Sequence
  source: /note="Description of Artificial Sequence: Synthetic peptide"
GYTFIDYN

SEQ ID NO: 838 - protein, 8 aa, Artificial Sequence
  source: /note="Description of Artificial Sequence: Synthetic peptide"
IYPYNGGT

SEQ ID NO: 839 - protein, 15 aa, Artificial Sequence
  source: /note="Description of Artificial Sequence: Synthetic peptide"
AREADYYGNRGQFDY

SEQ ID NO: 840 - protein, 107 aa, Artificial Sequence
  source: /note="Description of Artificial Sequence: Synthetic polypeptide"
DIQMTQSPASLSVSVGETVTITCRASENIFSNLAWYQQKQGKSPQLLVYGEANLADGVPSRFSGSGSGTQYSLKINSLQSEDFGNYYCQHFWGTPYTFGGGTTLEIK

SEQ ID NO: 841 - protein, 6 aa, Artificial Sequence
  source: /note="Description of Artificial Sequence: Synthetic peptide"
ENIFSN

SEQ ID NO: 842 - protein, 3 aa, Artificial Sequence
  source: /note="Description of Artificial Sequence: Synthetic peptide"
GEA

SEQ ID NO: 843 - protein, 9 aa, Artificial Sequence
  source: /note="Description of Artificial Sequence: Synthetic peptide"
QHFWGTPYT

SEQ ID NO: 844 - protein, 120 aa, Artificial Sequence
  source: /note="Description of Artificial Sequence: Synthetic polypeptide"
QVTLKESGPGILQPSQTLSLTCSFSGFSLNTSGTGVGWIRQPSGKGLEWLTHIWWNDNKFYNTFLKSRLTISKETSNNQVFLKIASVDTADAATYYCARMAYGNLWFVNWGQGTLVAVST

SEQ ID NO: 845 - protein, 10 aa, Artificial Sequence
  source: /note="Description of Artificial Sequence: Synthetic peptide"
GFSLNTSGTG

SEQ ID NO: 846 - protein, 7 aa, Artificial Sequence
  source: /note="Description of Artificial Sequence: Synthetic peptide"
IWWNDNK

SEQ ID NO: 847 - protein, 12 aa, Artificial Sequence
  source: /note="Description of Artificial Sequence: Synthetic peptide"
ARMAYGNLWFVN

SEQ ID NO: 848 - protein, 111 aa, Artificial Sequence
  source: /note="Description of Artificial Sequence: Synthetic polypeptide"
DIVLTQSPASLAVSLGQRASISCRASRSVTISGYSYMYWYQQKPGQPPRLLFYLASNLASGVPARFSGSGSGTDFTLNIHPVEEEDAAIYYCQHSRELPYTFGGGTKLEIK

SEQ ID NO: 849 - protein, 10 aa, Artificial Sequence
  source: /note="Description of Artificial Sequence: Synthetic peptide"
RSVTISGYSY

SEQ ID NO: 850 - protein, 3 aa, Artificial Sequence
  source: /note="Description of Artificial Sequence: Synthetic peptide"
LAS

SEQ ID NO: 851 - protein, 9 aa, Artificial Sequence
  source: /note="Description of Artificial Sequence: Synthetic peptide"
QHSRELPYT

SEQ ID NO: 852 - protein, 123 aa, Artificial Sequence
  source: /note="Description of Artificial Sequence: Synthetic polypeptide"
QIQLVQSGPELKKPRETVKISCKASGYTFTDYSMHWVKQAPGKGLKWMGWINTETGEPTYADDFKGRFAFSLEASASSAYLQINILKDEDTATYFCARSRGGYYEDYYALDYWGQGTSVTVSS

SEQ ID NO: 853 - protein, 8 aa, Artificial Sequence
  source: /note="Description of Artificial Sequence: Synthetic peptide"
GYTFTDYS

SEQ ID NO: 854 - protein, 8 aa, Artificial Sequence
  source: /note="Description of Artificial Sequence: Synthetic peptide"
INTETGEP

SEQ ID NO: 855 - protein, 16 aa, Artificial Sequence
  source: /note="Description of Artificial Sequence: Synthetic peptide"
ARSRGGYYEDYYALDY

SEQ ID NO: 856 - protein, 107 aa, Artificial Sequence
  source: /note="Description of Artificial Sequence: Synthetic polypeptide"
DIQMTQSPASLSASVGESVTITCRASGNIHYYLAWYQQKQGKSPQLLVYNAKNLADGVPSRFSGSGSGTQFSLKINSLQPEDFGSYYCQHFWISPPTFGGGTKLEIK

SEQ ID NO: 857 - protein, 6 aa, Artificial Sequence
  source: /note="Description of Artificial Sequence: Synthetic peptide"
GNIHYY

SEQ ID NO: 858 - protein, 3 aa, Artificial Sequence
  source: /note="Description of Artificial Sequence: Synthetic peptide"
NAK

SEQ ID NO: 859 - protein, 9 aa, Artificial Sequence
  source: /note="Description of Artificial Sequence: Synthetic peptide"
QHFWISPPT

SEQ ID NO: 860 - protein, 118 aa, Artificial Sequence
  source: /note="Description of Artificial Sequence: Synthetic polypeptide"
EVQLRQSGADLVKPGASVKLSCTASGFNIKDTYIDWVKQRPEQGLDWIGRIDPANGNTKYDPKFQGKATIITDTSSNTAYLQLSNLTSEDTAVYYCARYGSYPYFDYWGRGTTLAVSS

SEQ ID NO: 861 - protein, 8 aa, Artificial Sequence
  source: /note="Description of Artificial Sequence: Synthetic peptide"
GFNIKDTY

SEQ ID NO: 862 - protein, 8 aa, Artificial Sequence
  source: /note="Description of Artificial Sequence: Synthetic peptide"
IDPANGNT

SEQ ID NO: 863 - protein, 11 aa, Artificial Sequence
  source: /note="Description of Artificial Sequence: Synthetic peptide"
ARYGSYPYFDY

SEQ ID NO: 864 - protein, 107 aa, Artificial Sequence
  source: /note="Description of Artificial Sequence: Synthetic polypeptide"
SIVMTQTPKFLLISAGDRVTITCKASQSVRNDVAWYQQKPGQSPKLLMYYASNRYTGVPDRFTGSGYGTDFTFTISTVQAEDLAVYFCQQDYSSPPTFGGGTKLEIK

SEQ ID NO: 865 - protein, 6 aa, Artificial Sequence
  source: /note="Description of Artificial Sequence: Synthetic peptide"
QSVRND

SEQ ID NO: 866 - protein, 3 aa, Artificial Sequence
  source: /note="Description of Artificial Sequence: Synthetic peptide"
YAS

SEQ ID NO: 867 - protein, 9 aa, Artificial Sequence
  source: /note="Description of Artificial Sequence: Synthetic peptide"
QQDYSSPPT

SEQ ID NO: 868 - protein, 118 aa, Artificial Sequence
  source: /note="Description of Artificial Sequence: Synthetic polypeptide"
QVQLQQSGPELVRPGVSVKISCKVSGYTFTDYVMHWVKQSHAKSLEWIGIISPYSGNTNYNQNFKGKATMTVDKSSSTAYMALARLTSEDSAIYYCAREGDLPMFAYWGQGTLVTVSA

SEQ ID NO: 869 - protein, 8 aa, Artificial Sequence
  source: /note="Description of Artificial Sequence: Synthetic peptide"
GYTFTDYV

SEQ ID NO: 870 - protein, 8 aa, Artificial Sequence
  source: /note="Description of Artificial Sequence: Synthetic peptide"
ISPYSGNT

SEQ ID NO: 871 - protein, 11 aa, Artificial Sequence
  source: /note="Description of Artificial Sequence: Synthetic peptide"
AREGDLPMFAY

SEQ ID NO: 872 - protein, 106 aa, Artificial Sequence
  source: /note="Description of Artificial Sequence: Synthetic polypeptide"
QIVLTQSPTIMSASPGEKVTMTCSASSSVSYIYWYQQNPGSSPRLLIYDTSILASGVPFRFSGSGSGTSYSLTISRMEAEDAATYYCQQWTSYPLTFGSGTKLELK

SEQ ID NO: 873 - protein, 5 aa, Artificial Sequence
  source: /note="Description of Artificial Sequence: Synthetic peptide"
SSVSY

SEQ ID NO: 874 - protein, 3 aa, Artificial Sequence
  source: /note="Description of Artificial Sequence: Synthetic peptide"
DTS

SEQ ID NO: 875 - protein, 9 aa, Artificial Sequence
  source: /note="Description of Artificial Sequence: Synthetic peptide"
QQWTSYPLT

SEQ ID NO: 876 - protein, 120 aa, Artificial Sequence
  source: /note="Description of Artificial Sequence: Synthetic polypeptide"
EVQLQQSGPELVKPGASVKISCKASGYTFTDYNINWVKQSHGKSLEWIGYIYPYIGGSGYNQKFKSKATLSADNPSSTAYMELRSLTSEDSAVYYCAREDKTARNAMDYWGQGTPVTVSS

SEQ ID NO: 877 - protein, 8 aa, Artificial Sequence
  source: /note="Description of Artificial Sequence: Synthetic peptide"
GYTFTDYN

SEQ ID NO: 878 - protein, 8 aa, Artificial Sequence
  source: /note="Description of Artificial Sequence: Synthetic peptide"
IYPYIGGS

SEQ ID NO: 879 - protein, 13 aa, Artificial Sequence
  source: /note="Description of Artificial Sequence: Synthetic peptide"
AREDKTARNAMDY

SEQ ID NO: 880 - protein, 107 aa, Artificial Sequence
  source: /note="Description of Artificial Sequence: Synthetic polypeptide"
DIQMTQSPASLSVSVGETVTIICRVSENIYSNLAWYQQKQGKSPQLLVYEATNLAEGVPSRFSGSGSGTQYSLKINSLQSEDFGSYYCQHFWGTPYTFGGGTKLEIK

SEQ ID NO: 881 - protein, 6 aa, Artificial Sequence
  source: /note="Description of Artificial Sequence: Synthetic peptide"
ENIYSN

SEQ ID NO: 882 - protein, 3 aa, Artificial Sequence
  source: /note="Description of Artificial Sequence: Synthetic peptide"
EAT

SEQ ID NO: 883 - protein, 9 aa, Artificial Sequence
  source: /note="Description of Artificial Sequence: Synthetic peptide"
QHFWGTPYT

SEQ ID NO: 884 - protein, 120 aa, Artificial Sequence
  source: /note="Description of Artificial Sequence: Synthetic polypeptide"
DVQLQESGPGLVKPSQSLSLTCTVTGYSITSDYAWNWIRQFPGNKLEWMGYISYSGSTSYNPSLKSRISITRDTSKNQFFLQLNSVTTEDTATYYCARHYRYPPYAMDYWGQGTSVTVSS

SEQ ID NO: 885 - protein, 9 aa, Artificial Sequence
  source: /note="Description of Artificial Sequence: Synthetic peptide"
GYSITSDYA

SEQ ID NO: 886 - protein, 7 aa, Artificial Sequence
  source: /note="Description of Artificial Sequence: Synthetic peptide"
ISYSGST

SEQ ID NO: 887 - protein, 13 aa, Artificial Sequence
  source: /note="Description of Artificial Sequence: Synthetic peptide"
ARHYRYPPYAMDY

SEQ ID NO: 888 - protein, 113 aa, Artificial Sequence
  source: /note="Description of Artificial Sequence: Synthetic polypeptide"
DIVMTQSPSSLAMSVGQKVTMSCKSSQSLLNSSNQKNYLAWYQQKPGQSPKLLVYFASTRESGVPDRFIGSGSGTDFTLTITSVQAEDLADYFCQQHYSTPFTFGSGTKLEIK

SEQ ID NO: 889 - protein, 12 aa, Artificial Sequence
  source: /note="Description of Artificial Sequence: Synthetic peptide"
QSLLNSSNQKNY

SEQ ID NO: 890 - protein, 3 aa, Artificial Sequence
  source: /note="Description of Artificial Sequence: Synthetic peptide"
FAS

SEQ ID NO: 891 - protein, 9 aa, Artificial Sequence
  source: /note="Description of Artificial Sequence: Synthetic peptide"
QQHYSTPFT

SEQ ID NO: 892 - protein, 118 aa, Artificial Sequence
  source: /note="Description of Artificial Sequence: Synthetic polypeptide"
QVQLKQSGPGLVQPSQSLSITCTVSGFSLTSFGVHWVRQSPGKGLEWLGVIWSGGTTVYDAAFISRLSISKDNSKSQVFFKMNSLQTNDTAIYYCARKRGNFYVMDYWGQGTSVTVSS

SEQ ID NO: 893 - protein, 8 aa, Artificial Sequence
  source: /note="Description of Artificial Sequence: Synthetic peptide"
GFSLTSFG

SEQ ID NO: 894 - protein, 7 aa, Artificial Sequence
  source: /note="Description of Artificial Sequence: Synthetic peptide"
IWSGGTT

SEQ ID NO: 895 - protein, 12 aa, Artificial Sequence
  source: /note="Description of Artificial Sequence: Synthetic peptide"
ARKRGNFYVMDY

SEQ ID NO: 896 - protein, 113 aa, Artificial Sequence; identical to SEQ ID NO: 888
  source: /note="Description of Artificial Sequence: Synthetic polypeptide"

SEQ ID NO: 897 - protein, 12 aa, Artificial Sequence
  source: /note="Description of Artificial Sequence: Synthetic peptide"
QSLLNSSNQKNY

SEQ ID NO: 898 - protein, 3 aa, Artificial Sequence
  source: /note="Description of Artificial Sequence: Synthetic peptide"
FAS

SEQ ID NO: 899 - protein, 9 aa, Artificial Sequence
  source: /note="Description of Artificial Sequence: Synthetic peptide"
QQHYSTPFT

SEQ ID NO: 900 - protein, 118 aa, Artificial Sequence
  source: /note="Description of Artificial Sequence: Synthetic polypeptide"
QVQLQQPGSELVRPGTSVKLSCKASGYTFTSYWVHWVRQRHGQGLEWIGNVYPGSGSTNYDEKFKSKGTLTVDTSSSTAYMHLSSLTSEDSAVYYCTRGVLRFPLDYWGQGTTLTVSS

SEQ ID NO: 901 - protein, 8 aa, Artificial Sequence
  source: /note="Description of Artificial Sequence: Synthetic peptide"
GYTFTSYW

SEQ ID NO: 902 - protein, 8 aa, Artificial Sequence
  source: /note="Description of Artificial Sequence: Synthetic peptide"
VYPGSGST

SEQ ID NO: 903 - protein, 11 aa, Artificial Sequence
  source: /note="Description of Artificial Sequence: Synthetic peptide"
TRGVLRFPLDY

SEQ ID NO: 904 - protein, 112 aa, Artificial Sequence
  source: /note="Description of Artificial Sequence: Synthetic polypeptide"
DIVMTQAAPSVPVTPGESVSISCRSSKSLLHSNGNTYLYWFLQRPGQSPHLLIYRMSNLASGVPDRFSGSGSGTAFTLRISRVEAEDVGVYYCMQHLEYPLTFGAGTKLELK

SEQ ID NO: 905 - protein, 11 aa, Artificial Sequence
  source: /note="Description of Artificial Sequence: Synthetic peptide"
KSLLHSNGNTY

SEQ ID NO: 906 - protein, 3 aa, Artificial Sequence
  source: /note="Description of Artificial Sequence: Synthetic peptide"
RMS

SEQ ID NO: 907 - protein, 9 aa, Artificial Sequence
  source: /note="Description of Artificial Sequence: Synthetic peptide"
MQHLEYPLT

SEQ ID NO: 908 - protein, 118 aa, Artificial Sequence
  source: /note="Description of Artificial Sequence: Synthetic polypeptide"
QVQLQQSGPEVVRPGVSVKISCKGSGYKFPDYVMHWVKQSHAKSLEWIGIISIYSGNTNYNQKFKGKATMTVDKSSSTAYMELARLTSEDSAIYYCAREGDLPMFAYWGQGTLVTVSA

SEQ ID NO: 909 - protein, 8 aa, Artificial Sequence
  source: /note="Description of Artificial Sequence: Synthetic peptide"
GYKFPDYV

SEQ ID NO: 910 - protein, 8 aa, Artificial Sequence
  source: /note="Description of Artificial Sequence: Synthetic peptide"
ISIYSGNT

SEQ ID NO: 911 - protein, 11 aa, Artificial Sequence
  source: /note="Description of Artificial Sequence: Synthetic peptide"
AREGDLPMFAY

SEQ ID NO: 912 - protein, 106 aa, Artificial Sequence
  source: /note="Description of Artificial Sequence: Synthetic polypeptide"
QIVLTQSPAIMSASPGEKVTMTCNASSSVSYMYWYQQKPISSPRLLIYDTSNLASGVPVRFSGSGSGTSYSLTIGRMEAEDAATYYCQQWSSYPLTFGAGTKVEVK

SEQ ID NO: 913 - protein, 5 aa, Artificial Sequence
  source: /note="Description of Artificial Sequence: Synthetic peptide"
SSVSY

SEQ ID NO: 914 - protein, 3 aa, Artificial Sequence
  source: /note="Description of Artificial Sequence: Synthetic peptide"
DTS

SEQ ID NO: 915 - protein, 9 aa, Artificial Sequence
  source: /note="Description of Artificial Sequence: Synthetic peptide"
QQWSSYPLT

SEQ ID NO: 916 - protein, 122 aa, Artificial Sequence
  source: /note="Description of Artificial Sequence: Synthetic polypeptide"
QVQLKESGPGLVAPSQSLSITCTVSGFSLTAYNINWVRQPPGKGLEWLGMIWGDGNTDYNSPLKSRLTISKDNSKSQVFLKMDSLQTDDTARYYCARDLKVRRDSPYTMDYWGQGTSVTVSS

SEQ ID NO: 917 - protein, 8 aa, Artificial Sequence
  source: /note="Description of Artificial Sequence: Synthetic peptide"
GFSLTAYN

SEQ ID NO: 918 - protein, 7 aa, Artificial Sequence
  source: /note="Description of Artificial Sequence: Synthetic peptide"
IWGDGNT

SEQ ID NO: 919 - protein, 16 aa, Artificial Sequence
  source: /note="Description of Artificial Sequence: Synthetic peptide"
ARDLKVRRDSPYTMDY

SEQ ID NO: 920 - protein, 112 aa, Artificial Sequence
  source: /note="Description of Artificial Sequence: Synthetic polypeptide"
NIMMTQSPSSLAVSAGEKVTMSCKSSQSVLYSSNQKNYLAWYQQKPGQSPKLLIYWASNRESGVPDRFTGSGSGTDFTLTISSVQAEDLAVYYCHQYLSSYTFGGGTKLEIK

SEQ ID NO: 921 - protein, 12 aa, Artificial Sequence
  source: /note="Description of Artificial Sequence: Synthetic peptide"
QSVLYSSNQKNY

SEQ ID NO: 922 - protein, 3 aa, Artificial Sequence
  source: /note="Description of Artificial Sequence: Synthetic peptide"
WAS

SEQ ID NO: 923 - protein, 8 aa, Artificial Sequence
  source: /note="Description of Artificial Sequence: Synthetic peptide"
HQYLSSYT

SEQ ID NO: 924 - protein, 124 aa, Artificial Sequence
  source: /note="Description of Artificial Sequence: Synthetic polypeptide"
DVQLQESGPGLVKPSQSLSLTCTVTGYSLTSDYAWNWIRQFPGNKLEWMGYITYSGGTTYNPSLKSRISITRDTSKNQFFLQLTSVTTEDTATYYCARRGSGTTVVGDWYFDVWGAGTTVTVSS

SEQ ID NO: 925 - protein, 9 aa, Artificial Sequence
  source: /note="Description of Artificial Sequence: Synthetic peptide"
GYSLTSDYA

SEQ ID NO: 926 - protein, 7 aa, Artificial Sequence
  source: /note="Description of Artificial Sequence: Synthetic peptide"
ITYSGGT

SEQ ID NO: 927 - protein, 17 aa, Artificial Sequence
  source: /note="Description of Artificial Sequence: Synthetic peptide"
ARRGSGTTVVGDWYFDV

SEQ ID NO: 928 - protein, 113 aa, Artificial Sequence
  source: /note="Description of Artificial Sequence: Synthetic polypeptide"
DIVMSQSPSSLAVSVGEKVTMSCKSSQSLLYSFNQKYYLAWYQQKPGQSPKLLIYWASTRESGVPDRFTGSGSGTDFTPTISSVTAEDLAVYYCQQFYTYPYTFGGGTKLEMK

SEQ ID NO: 929 - protein, 12 aa, Artificial Sequence
  source: /note="Description of Artificial Sequence: Synthetic peptide"
QSLLYSFNQKYY

SEQ ID NO: 930 - protein, 3 aa, Artificial Sequence
  source: /note="Description of Artificial Sequence: Synthetic peptide"
WAS

SEQ ID NO: 931 - protein, 9 aa, Artificial Sequence
  source: /note="Description of Artificial Sequence: Synthetic peptide"
QQFYTYPYT

SEQ ID NO: 932 - protein, 122 aa, Artificial Sequence
  source: /note="Description of Artificial Sequence: Synthetic polypeptide"
EVQVQQSGPELVKPGASVKISCKASGYTFTKSNMHWVKQSHGKSLEWIGYIYPYNGGTGYNQNFKSKATLTVDISSSTAYMELRSLTLEDSAVYLCAREADYYGNRGQFDYWGQGTLVTVSA

SEQ ID NO: 933 - protein, 8 aa, Artificial Sequence
  source: /note="Description of Artificial Sequence: Synthetic peptide"
GYTFTKSN

SEQ ID NO: 934 - protein, 8 aa, Artificial Sequence
  source: /note="Description of Artificial Sequence: Synthetic peptide"
IYPYNGGT

SEQ ID NO: 935 - protein, 15 aa, Artificial Sequence
  source: /note="Description of Artificial Sequence: Synthetic peptide"
AREADYYGNRGQFDY

SEQ ID NO: 936 - protein, 107 aa, Artificial Sequence
  source: /note="Description of Artificial Sequence: Synthetic polypeptide"
DIQMTQSPASLSVSVGETVTITCRASDNIFSNLAWYHQKQGKSPHLLVYGATNLADGVPSRFSGSGSGTQYSLKINSLQSEDFGDYYCQHFWGTPYTFGGGTKLEIK

SEQ ID NO: 937 - protein, 6 aa, Artificial Sequence
  source: /note="Description of Artificial Sequence: Synthetic peptide"
DNIFSN

SEQ ID NO: 938 - protein, 3 aa, Artificial Sequence
  source: /note="Description of Artificial Sequence: Synthetic peptide"
GAT

SEQ ID NO: 939 - protein, 9 aa, Artificial Sequence
  source: /note="Description of Artificial Sequence: Synthetic peptide"
QHFWGTPYT

SEQ ID NO: 940 - protein, 119 aa, Artificial Sequence
  source: /note="Description of Artificial Sequence: Synthetic polypeptide"
QVQLQQSGAELMRPGTSVKVSCKASGYAFTNHLIEWIKQRPGQGLEWIGVINPGSDSTDYNEKFKDKATLTADKSSSTAYMQLSSLTSDDSAVYFCARSLYYNSWFVYWGQGTLVTVSA

SEQ ID NO: 941 - protein, 8 aa, Artificial Sequence
  source: /note="Description of Artificial Sequence: Synthetic peptide"
GYAFTNHL

SEQ ID NO: 942 - protein, 8 aa, Artificial Sequence
  source: /note="Description of Artificial Sequence: Synthetic peptide"
INPGSDST

SEQ ID NO: 943 - protein, 12 aa, Artificial Sequence
  source: /note="Description of Artificial Sequence: Synthetic peptide"
ARSLYYNSWFVY

SEQ ID NO: 944 - protein, 107 aa, Artificial Sequence
  source: /note="Description of Artificial Sequence: Synthetic polypeptide"
DIQMTQSPASLSASVGETVTITCRASENIYSYLAWYQQKRGKSPQLLVYNAKTLVEGVPSRFSGSGSGTQFSLKINSLQPEDFGSYYCQHHYGTPYTFGGGTKLEIK

SEQ ID NO: 945 - protein, 6 aa, Artificial Sequence
  source: /note="Description of Artificial Sequence: Synthetic peptide"
ENIYSY

SEQ ID NO: 946 - protein, 3 aa, Artificial Sequence
  source: /note="Description of Artificial Sequence: Synthetic peptide"
NAK

SEQ ID NO: 947 - protein, 9 aa, Artificial Sequence
  source: /note="Description of Artificial Sequence: Synthetic peptide"
QHHYGTPYT

SEQ ID NO: 948 - protein, 118 aa, Artificial Sequence
  source: /note="Description of Artificial Sequence: Synthetic polypeptide"
EVQLQQSGAELVKPGASVRLSCTASGFSIRDTYIHWVKQRPEQGLDWIGKIDPANGKSEYDPKFQGRATMTTDTSSNTAYLQLSSLTSEDTAVYYCTRYGYYPYFDVWGAGTTVTVFS

SEQ ID NO: 949 - protein, 8 aa, Artificial Sequence
  source: /note="Description of Artificial Sequence: Synthetic peptide"
GFSIRDTY

SEQ ID NO: 950 - protein, 8 aa, Artificial Sequence
  source: /note="Description of Artificial Sequence: Synthetic peptide"
IDPANGKS

SEQ ID NO: 951 - protein, 11 aa, Artificial Sequence
  source: /note="Description of Artificial Sequence: Synthetic peptide"
TRYGYYPYFDV

SEQ ID NO: 952 - protein, 107 aa, Artificial Sequence
  source: /note="Description of Artificial Sequence: Synthetic polypeptide"
SIVMTQTPKFLLVSAGDRVAITCKASQSVRHDVVWYQQKPGQSPKLLIYYASSRYTGVPDRFTGSGYGTDFTFTISTVQAEDLALYFCLQDFSSPWTFGGGTKLEIK

SEQ ID NO: 953 - protein, 6 aa, Artificial Sequence
  source: /note="Description of Artificial Sequence: Synthetic peptide"
QSVRHD

SEQ ID NO: 954 - protein, 3 aa, Artificial Sequence
  source: /note="Description of Artificial Sequence: Synthetic peptide"
YAS

SEQ ID NO: 955 - protein, 9 aa, Artificial Sequence
  source: /note="Description of Artificial Sequence: Synthetic peptide"
LQDFSSPWT

SEQ ID NO: 956 - protein, 120 aa, Artificial Sequence
  source: /note="Description of Artificial Sequence: Synthetic polypeptide"
EVQLQQSGPELVKPGASVKISCKTSGYTFTKNTMHWVRQSHGKSLEWIGGINPNSGGASFNQKFMGKATLTVDKSSSTAYMELRSLTSEDSAVYYCARDGYDGDWFFDVWGAGTTVTVSS

SEQ ID NO: 957 - protein, 8 aa, Artificial Sequence
  source: /note="Description of Artificial Sequence: Synthetic peptide"
GYTFTKNT

SEQ ID NO: 958 - protein, 8 aa, Artificial Sequence
  source: /note="Description of Artificial Sequence: Synthetic peptide"
INPNSGGA

SEQ ID NO: 959 - protein, 13 aa, Artificial Sequence
  source: /note="Description of Artificial Sequence: Synthetic peptide"
ARDGYDGDWFFDV

SEQ ID NO: 960 - protein, 107 aa, Artificial Sequence
  source: /note="Description of Artificial Sequence: Synthetic polypeptide"
DIQMNQSPFSLSASLGDTVTITCHASQNIYVWLSWYQQKPGNIPKLLIYKASDLHTGVPSRFSGSGSGTDFTLNISSLQPEDIATYYCQQGQSYPRTFGGGTKLEIK

SEQ ID NO: 961 - protein, 6 aa, Artificial Sequence
  source: /note="Description of Artificial Sequence: Synthetic peptide"
QNIYVW

SEQ ID NO: 962 - protein, 3 aa, Artificial Sequence
  source: /note="Description of Artificial Sequence: Synthetic peptide"
KAS

SEQ ID NO: 963 - protein, 9 aa, Artificial Sequence
  source: /note="Description of Artificial Sequence: Synthetic peptide"
QQGQSYPRT

SEQ ID NO: 964 - protein, 114 aa, Artificial Sequence
  source: /note="Description of Artificial Sequence: Synthetic polypeptide"
QVQLKESGPGLVAPSQSLSITCTVSGFSLIGHGVNWIRQPPGKGLEWLGVIWGDGNTDYNSALKSRLSISKDNSKSQVFLKMNSLQTDDTARYFCAVNSAMDYWGQGTAVTVSS

SEQ ID NO: 965 - protein, 8 aa, Artificial Sequence
  source: /note="Description of Artificial Sequence: Synthetic peptide"
GFSLIGHG

SEQ ID NO: 966 - protein, 7 aa, Artificial Sequence
  source: /note="Description of Artificial Sequence: Synthetic peptide"
IWGDGNT

SEQ ID NO: 967 - protein, 8 aa, Artificial Sequence
  source: /note="Description of Artificial Sequence: Synthetic peptide"
AVNSAMDY

SEQ ID NO: 968 - protein, 107 aa, Artificial Sequence
  source: /note="Description of Artificial Sequence: Synthetic polypeptide"
NIVMTQSPKSMSMSVGERVTLNCTASENVASFVSWYQQKPEQSPKLLIYGTSNRYTGVPDRFTGSGSATDFTLTISSVQAEDLGDYHCGQSYNYPFTFGSGTKLEIE

SEQ ID NO: 969 - protein, 6 aa, Artificial Sequence
  source: /note="Description of Artificial Sequence: Synthetic peptide"
ENVASF

SEQ ID NO: 970 - protein, 3 aa, Artificial Sequence
  source: /note="Description of Artificial Sequence: Synthetic peptide"
GTS

SEQ ID NO: 971 - protein, 9 aa, Artificial Sequence
  source: /note="Description of Artificial Sequence: Synthetic peptide"
GQSYNYPFT

SEQ ID NO: 972 - protein, 119 aa, Artificial Sequence
  source: /note="Description of Artificial Sequence: Synthetic polypeptide"
QVQLQQSGAELVRPGASVKVSCKTSGYAFTNYLIEWVKQRPGQGLEWIGVINPGSGGIYYNDKFKVKTTLTADKSSSTAYMQLSSLTSDDSAVYFCARSETHDTWFAYWGQGTLVTVSA

SEQ ID NO: 973 - protein, 8 aa, Artificial Sequence
  source: /note="Description of Artificial Sequence: Synthetic peptide"
GYAFTNYL

SEQ ID NO: 974 - protein, 8 aa, Artificial Sequence
  source: /note="Description of Artificial Sequence: Synthetic peptide"
INPGSGGI

SEQ ID NO: 975 - protein, 12 aa, Artificial Sequence
  source: /note="Description of Artificial Sequence: Synthetic peptide"
ARSETHDTWFAY

SEQ ID NO: 976 - protein, 108 aa, Artificial Sequence
  source: /note="Description of Artificial Sequence: Synthetic polypeptide"
DIVMTQSQKFISTSVGDRVSITCKASQSVRIAVAWFQQKPGQSPKALIYLASTRHTGVPDRFTGSGSGTDFTLTISNVQSEDLADYFCLQHWNYPYTFGGGTKLEIKR

SEQ ID NO: 977 - protein, 6 aa, Artificial Sequence
  source: /note="Description of Artificial Sequence: Synthetic peptide"
QSVRIA

SEQ ID NO: 978 - protein, 3 aa, Artificial Sequence
  source: /note="Description of Artificial Sequence: Synthetic peptide"
LAS

SEQ ID NO: 979 - protein, 9 aa, Artificial Sequence
  source: /note="Description of Artificial Sequence: Synthetic peptide"
LQHWNYPYT

SEQ ID NO: 980 - protein, 120 aa, Artificial Sequence
  source: /note="Description of Artificial Sequence: Synthetic polypeptide"
QVQLQQSGAELVRPGTSVKMSCKAAGYTFTNYWIGWVKQRPGHGLEWIGDIYPGGGYTNYNEKFKGKATLTADTSSSTAYMQLSSLTSEDSAIYYCASPYYGSSYGFAFWGQGTLVTVSA

SEQ ID NO: 981 - protein, 8 aa, Artificial Sequence
  source: /note="Description of Artificial Sequence: Synthetic peptide"
GYTFTNYW

SEQ ID NO: 982 - protein, 8 aa, Artificial Sequence
  source: /note="Description of Artificial Sequence: Synthetic peptide"
IYPGGGYT

SEQ ID NO: 983 - protein, 13 aa, Artificial Sequence
  source: /note="Description of Artificial Sequence: Synthetic peptide"
ASPYYGSSYGFAF

SEQ ID NO: 984 - protein, 108 aa, Artificial Sequence; identical to SEQ ID NO: 976
  source: /note="Description of Artificial Sequence: Synthetic polypeptide"

SEQ ID NO: 985 - protein, 6 aa, Artificial Sequence
  source: /note="Description of Artificial Sequence: Synthetic peptide"
QSVRIA

SEQ ID NO: 986 - protein, 3 aa, Artificial Sequence
  source: /note="Description of Artificial Sequence: Synthetic peptide"
LAS

SEQ ID NO: 987 - protein, 9 aa, Artificial Sequence
  source: /note="Description of Artificial Sequence: Synthetic peptide"
LQHWNYPYT

SEQ ID NO: 988 - protein, 117 aa, Artificial Sequence
  source: /note="Description of Artificial Sequence: Synthetic polypeptide"
QVQLKESGPGLVAPSQSLSITCTVSGFSLSGYGIKWVRQPPGKGLEWLGTIWGDGSTDYNSALKSRLSISKDNSKSQVFLKMTSLQTDDTARYYCASDSLGITFGYWGQGTLVTVSA

SEQ ID NO: 989 - protein, 8 aa, Artificial Sequence
  source: /note="Description of Artificial Sequence: Synthetic peptide"
GFSLSGYG

SEQ ID NO: 990 - protein, 7 aa, Artificial Sequence
  source: /note="Description of Artificial Sequence: Synthetic peptide"
IWGDGST

SEQ ID NO: 991 - protein, 11 aa, Artificial Sequence
  source: /note="Description of Artificial Sequence: Synthetic peptide"
ASDSLGITFGY

SEQ ID NO: 992 - protein, 107 aa, Artificial Sequence
  source: /note="Description of Artificial Sequence: Synthetic polypeptide"
DIQMTQTTSSLSASLGDRVTISCRASQDISNYLNWYQQKPDGTVKLLIYYTSRLHSGVPSRFSGSGSGTDYSLTISNLEQEDIATYFCQQGNTLPLTFGAGTKLELK

SEQ ID NO: 993 - protein, 6 aa, Artificial Sequence
  source: /note="Description of Artificial Sequence: Synthetic peptide"
QDISNY

SEQ ID NO: 994 - protein, 3 aa, Artificial Sequence
  source: /note="Description of Artificial Sequence: Synthetic peptide"
YTS

SEQ ID NO: 995 - protein, 9 aa, Artificial Sequence
  source: /note="Description of Artificial Sequence: Synthetic peptide"
QQGNTLPLT

SEQ ID NO: 996 - protein, 120 aa, Artificial Sequence
  source: /note="Description of Artificial Sequence: Synthetic polypeptide"
QVQLKESGPGLVAPSQSLSITCTVSGFSLTSYAITWVRQPPGKGLEWLGVIWPGGGTNYNSALKSRLSISKDNSKSHLFLKMNSLQTDDTARYYCVRSYDGYLDWYFDVWGTGTTVTVSS

SEQ ID NO: 997 - protein, 8 aa, Artificial Sequence
  source: /note="Description of Artificial Sequence: Synthetic peptide"
GFSLTSYA

SEQ ID NO: 998 - protein, 7 aa, Artificial Sequence
  source: /note="Description of Artificial Sequence: Synthetic peptide"
IWPGGGT

SEQ ID NO: 999 - protein, 14 aa, Artificial Sequence
  source: /note="Description of Artificial Sequence: Synthetic peptide"
VRSYDGYLDWYFDV

SEQ ID NO: 1000 - protein, 107 aa, Artificial Sequence
  source: /note="Description of Artificial Sequence: Synthetic polypeptide"
NIVMTQSPKSMSMSVGERVTLSCKASENVGTYVSWYQQKPDQSPKLLIYGASNRYTGVPDRFTGSGSATDFTLIISSVQAEDLSDYHCGQSYSYPYTFGGGTKLEII

SEQ ID NO: 1001 - protein, 6 aa, Artificial Sequence
  source: /note="Description of Artificial Sequence: Synthetic peptide"
ENVGTY

SEQ ID NO: 1002 - protein, 3 aa, Artificial Sequence
  source: /note="Description of Artificial Sequence: Synthetic peptide"
GAS

SEQ ID NO: 1003 - protein, 9 aa, Artificial Sequence
  source: /note="Description of Artificial Sequence: Synthetic peptide"
GQSYSYPYT

SEQ ID NO: 1004 - protein, 123 aa, Artificial Sequence
  source: /note="Description of Artificial Sequence: Synthetic polypeptide"
QIQLVQSGPDLKKPGETVKISCKASGYTFTTYGMSWVKQAPGRGLKWMGWINTYSGVSTFPDDFKGRFAFSLETSASTAYLQINNLKNEDSATYFCARLGMGSTTGAGYFDVWGTGTTVTVSS

SEQ ID NO: 1005 - protein, 8 aa, Artificial Sequence
  source: /note="Description of Artificial Sequence: Synthetic peptide"
GYTFTTYG

SEQ ID NO: 1006 - protein, 8 aa, Artificial Sequence
  source: /note="Description of Artificial Sequence: Synthetic peptide"
INTYSGVS

SEQ ID NO: 1007 - protein, 16 aa, Artificial Sequence
  source: /note="Description of Artificial Sequence: Synthetic peptide"
ARLGMGSTTGAGYFDV

SEQ ID NO: 1008 - protein, 108 aa, Artificial Sequence
  source: /note="Description of Artificial Sequence: Synthetic polypeptide"
DIVLTQSPAIMSASPGEKVTMTCSASSSVSSWYLHWYQQKSGASPKLWIYGTSNLASGVPARFSGSGSGTSYSLTISSVEAEDAATYYCQQYRSDPYTFGSGTKLEIK

SEQ ID NO: 1009 - protein, 7 aa, Artificial Sequence
  source: /note="Description of Artificial Sequence: Synthetic peptide"
SSVSSWY

SEQ ID NO: 1010 - protein, 3 aa, Artificial Sequence
  source: /note="Description of Artificial Sequence: Synthetic peptide"
GTS

SEQ ID NO: 1011 - protein, 9 aa, Artificial Sequence
  source: /note="Description of Artificial Sequence: Synthetic peptide"
QQYRSDPYT

SEQ ID NO: 1012 - protein, 123 aa, Artificial Sequence
  source: /note="Description of Artificial Sequence: Synthetic polypeptide"
QIQLVQSGPELKKPGETVKISCKASGYTFTTYGMSWVKQAPGKGLKWMGWINTYSGVSTYADDFEGRFAFSLETSVSTAYLQINNLKNEDTATYFCARLGRGSTTGAGYLDVWGTGTTVTVSS

SEQ ID NO: 1013 - protein, 8 aa, Artificial Sequence
  source: /note="Description of Artificial Sequence: Synthetic peptide"
GYTFTTYG

SEQ ID NO: 1014 - protein, 8 aa, Artificial Sequence
  source: /note="Description of Artificial Sequence: Synthetic peptide"
INTYSGVS

SEQ ID NO: 1015 - protein, 16 aa, Artificial Sequence
  source: /note="Description of Artificial Sequence: Synthetic peptide"
ARLGRGSTTGAGYLDV

SEQ ID NO: 1016 - protein, 108 aa, Artificial Sequence
  source: /note="Description of Artificial Sequence: Synthetic polypeptide"
DIVLTQSPAIMSASPGEKVSMTCSASSSVSSWYLHWYQQKSGASPKLWIYGTSNLASGVPARFSGSGSGTSYSLTISSVEAEDAATYYCQQYHSDPYTFGSGTKLEIK

SEQ ID NO: 1017 - protein, 7 aa, Artificial Sequence
  source: /note="Description of Artificial Sequence: Synthetic peptide"
SSVSSWY

SEQ ID NO: 1018 - protein, 3 aa, Artificial Sequence
  source: /note="Description of Artificial Sequence: Synthetic peptide"
GTS

SEQ ID NO: 1019 - protein, 9 aa, Artificial Sequence
  source: /note="Description of Artificial Sequence: Synthetic peptide"
QQYHSDPYT

SEQ ID NO: 1020 - protein, 123 aa, Artificial Sequence; identical to SEQ ID NO: 1004
  source: /note="Description of Artificial Sequence: Synthetic polypeptide"

SEQ ID NO: 1021 - protein, 8 aa, Artificial Sequence
  source: /note="Description of Artificial Sequence: Synthetic peptide"
GYTFTTYG

SEQ ID NO: 1022 - protein, 8 aa, Artificial Sequence
  source: /note="Description of Artificial Sequence: Synthetic peptide"
INTYSGVS

SEQ ID NO: 1023 - protein, 16 aa, Artificial Sequence
  source: /note="Description of Artificial Sequence: Synthetic peptide"
ARLGMGSTTGAGYFDV

SEQ ID NO: 1024 - protein, 106 aa, Artificial Sequence
  source: /note="Description of Artificial Sequence: Synthetic polypeptide"
ENVLTQSPAIMSASLGEKVTLSCRASSSVNYMYWYQQKSDASPKLWIYYTSNLAPGVPARFSGSGSGNSYSLTISSVEGEDAATYYCQQFTSSPWTFGGGTKLEIK

SEQ ID NO: 1025 - protein, 5 aa, Artificial Sequence
  source: /note="Description of Artificial Sequence: Synthetic peptide"
SSVNY

SEQ ID NO: 1026 - protein, 3 aa, Artificial Sequence
  source: /note="Description of Artificial Sequence: Synthetic peptide"
YTS

SEQ ID NO: 1027 - protein, 9 aa, Artificial Sequence
  source: /note="Description of Artificial Sequence: Synthetic peptide"
QQFTSSPWT

SEQ ID NO: 1028 - protein, 114 aa, Artificial Sequence
  source: /note="Description of Artificial Sequence: Synthetic polypeptide"
EVQLQQSGPELVKPGASVKISCKASGYTFTDYSMNWVKQSHGKSLEWIGDITPNNGSPNYNQKFKDKATLTVDKSSSTVYMELRSLTSEDSAVYYCASLFFDYWGHGTTLTVSS

SEQ ID NO: 1029 - protein, 8 aa, Artificial Sequence
  source: /note="Description of Artificial Sequence: Synthetic peptide"
GYTFTDYS

SEQ ID NO: 1030 - protein, 8 aa, Artificial Sequence
  source: /note="Description of Artificial Sequence: Synthetic peptide"
ITPNNGSP

SEQ ID NO: 1031 - protein, 7 aa, Artificial Sequence
  source: /note="Description of Artificial Sequence: Synthetic peptide"
ASLFFDY

SEQ ID NO: 1032 - protein, 113 aa, Artificial Sequence
  source: /note="Description of Artificial Sequence: Synthetic polypeptide"
DIVMTQSPSSLSVSAGEKVTMSCKSSQSLLNSGNQKNYLAWYQQKPGQPPKLLIYGASTRDSGVPDRFTGSGSGTDFTLTITSVQAEDLAVYYCQNDHTYPYTFGGGTKLEIK

SEQ ID NO: 1033 - protein, 12 aa, Artificial Sequence
  source: /note="Description of Artificial Sequence: Synthetic peptide"
QSLLNSGNQKNY

SEQ ID NO: 1034 - protein, 3 aa, Artificial Sequence
  source: /note="Description of Artificial Sequence: Synthetic peptide"
GAS

SEQ ID NO: 1035 - protein, 9 aa, Artificial Sequence
  source: /note="Description of Artificial Sequence: Synthetic peptide"
QNDHTYPYT

SEQ ID NO: 1036 - protein, 120 aa, Artificial Sequence
  source: /note="Description of Artificial Sequence: Synthetic polypeptide"
QVQLQQPGTELVKPGASVKLSCKASGFTFTTHWMHWVRQRPGQGLEWIGNIYPSNGGSNYNEKFKTKATLTVDRSSSTAYMHLSSLTSEDSAVYYCARRVNWDGYYFDYWGQGTTLTVSS

SEQ ID NO: 1037 - protein, 8 aa, Artificial Sequence
  source: /note="Description of Artificial Sequence: Synthetic peptide"
GFTFTTHW

SEQ ID NO: 1038 - protein, 8 aa, Artificial Sequence
  source: /note="Description of Artificial Sequence: Synthetic peptide"
IYPSNGGS

SEQ ID NO: 1039 - protein, 13 aa, Artificial Sequence
  source: /note="Description of Artificial Sequence: Synthetic peptide"
ARRVNWDGYYFDY

SEQ ID NO: 1040 - protein, 107 aa, Artificial Sequence
  source: /note="Description of Artificial Sequence: Synthetic polypeptide"
DIVMTQSQKFMSTSVGDRVSVTCKASQNVGTNVAWYQQKPGQSPKLLIYSASYRYSGVPDRFTGSGSGTDFTLTISNVQSEDLADYFCQQYNSYPLTFGGGTKLEIK

SEQ ID NO: 1041 - protein, 6 aa, Artificial Sequence
  source: /note="Description of Artificial Sequence: Synthetic peptide"
QNVGTN

SEQ ID NO: 1042 - protein, 3 aa, Artificial Sequence
  source: /note="Description of Artificial Sequence: Synthetic peptide"
SAS

SEQ ID NO: 1043 - protein, 9 aa, Artificial Sequence
  source: /note="Description of Artificial Sequence: Synthetic peptide"
QQYNSYPLT

SEQ ID NO: 1044 - protein, 118 aa, Artificial Sequence
  source: /note="Description of Artificial Sequence: Synthetic polypeptide"
QVQLQESGTELVKPGASVKLSCKASGYTFTSYWIHWVKQRPGQGLEWIGNINPSNGGTNYNEKFKSKAALTVDKSSSTAYMQLSSLTSEDSAVYYCARRGLPYFFDYWGQGTTLTVSS

SEQ ID NO: 1045 - protein, 8 aa, Artificial Sequence
  source: /note="Description of Artificial Sequence: Synthetic peptide"
GYTFTSYW

SEQ ID NO: 1046 - protein, 8 aa, Artificial Sequence
  source: /note="Description of Artificial Sequence: Synthetic peptide"
INPSNGGT

SEQ ID NO: 1047 - protein, 11 aa, Artificial Sequence
  source: /note="Description of Artificial Sequence: Synthetic peptide"
ARRGLPYFFDY

SEQ ID NO: 1048 - protein, 107 aa, Artificial Sequence
  source: /note="Description of Artificial Sequence: Synthetic polypeptide"
DIVMTQSQKFMSTSVGDRVSVTCKGSQNVGYNVAWYQQKPGQSPKALVYSASDRHSGVPDRFAGSGSGTDFTLTISNVQSEDLAEYFCQQYNSYPLTFGAGTKLELK

SEQ ID NO: 1049 - protein, 6 aa, Artificial Sequence
  source: /note="Description of Artificial Sequence: Synthetic peptide"
QNVGYN

SEQ ID NO: 1050 - protein, 3 aa, Artificial Sequence
  source: /note="Description of Artificial Sequence: Synthetic peptide"
SAS

SEQ ID NO: 1051 - protein, 9 aa, Artificial Sequence
  source: /note="Description of Artificial Sequence: Synthetic peptide"
QQYNSYPLT

SEQ ID NO: 1052 - protein, 120 aa, Artificial Sequence
  source: /note="Description of Artificial Sequence: Synthetic polypeptide"
QVQLVQSGAEVKKPGASVKVSCKASGYTFTDYNINWVRQAPGQGLEWMGYIYPYIGGSGYAQKFQGRVTMTRDTSTSTVYMELSSLRSEDTAVYYCAREDKTARNAMDYWGQGTLVTVSS

SEQ ID NO: 1053 - protein, 8 aa, Artificial Sequence
  source: /note="Description of Artificial Sequence: Synthetic peptide"
GYTFTDYN

SEQ ID NO: 1054 - protein, 8 aa, Artificial Sequence
  source: /note="Description of Artificial Sequence: Synthetic peptide"
IYPYIGGS

SEQ ID NO: 1055 - protein, 13 aa, Artificial Sequence
  source: /note="Description of Artificial Sequence: Synthetic peptide"
AREDKTARNAMDY

SEQ ID NO: 1056 - protein, 107 aa, Artificial Sequence
  source: /note="Description of Artificial Sequence: Synthetic polypeptide"
DIQMTQSPSSLSASVGDRVTITCRVSENIYDVLAWYQQKPGKAPKLLIYEATNLAEGVPSRFSGSGSGTDFTLTISSLQPEDFATYYCQHFWGTPYTFGQGTKLEIK

SEQ ID NO: 1057 - protein, 6 aa, Artificial Sequence
  source: /note="Description of Artificial Sequence: Synthetic peptide"
ENIYDV

SEQ ID NO: 1058 - protein, 3 aa, Artificial Sequence
  source: /note="Description of Artificial Sequence: Synthetic peptide"
EAT

SEQ ID NO: 1059 - protein, 9 aa, Artificial Sequence
  source: /note="Description of Artificial Sequence: Synthetic peptide"
QHFWGTPYT

SEQ ID NO: 1060 - protein, 8 aa, Artificial Sequence
  source: /note="Description of Artificial Sequence: Synthetic peptide"
GGTFSSYA

SEQ ID NO: 1061 - protein, 8 aa, Artificial Sequence
  source: /note="Description of Artificial Sequence: Synthetic peptide"
IIPIFGTA

SEQ ID NO: 1062 - protein, 13 aa, Artificial Sequence
  source: /note="Description of Artificial Sequence: Synthetic peptide"
AREEVSSPYGMDV

SEQ ID NO: 1063 - protein, 9 aa, Artificial Sequence
  source: /note="Description of Artificial Sequence: Synthetic peptide"
TGAVTSGHY

SEQ ID NO: 1064 - protein, 3 aa, Artificial Sequence
  source: /note="Description of Artificial Sequence: Synthetic peptide"
DTG

SEQ ID NO: 1065 - protein, 10 aa, Artificial Sequence
  source: /note="Description of Artificial Sequence: Synthetic peptide"
LLSYSGASWV

SEQ ID NO: 1066 - protein, 8 aa, Artificial Sequence
  source: /note="Description of Artificial Sequence: Synthetic peptide"
GGTFSSSA

SEQ ID NO: 1067 - protein, 8 aa, Artificial Sequence
  source: /note="Description of Artificial Sequence: Synthetic peptide"
IIPIYGIT

SEQ ID NO: 1068 - protein, 22 aa, Artificial Sequence
  source: /note="Description of Artificial Sequence: Synthetic peptide"
ARDDTARRVRGVPYYYYYAMDV

SEQ ID NO: 1069 - protein, 6 aa, Artificial Sequence
  source: /note="Description of Artificial Sequence: Synthetic peptide"
QGIGNY

SEQ ID NO: 1070 - protein, 3 aa, Artificial Sequence
  source: /note="Description of Artificial Sequence: Synthetic peptide"
SAS

SEQ ID NO: 1071 - protein, 9 aa, Artificial Sequence
  source: /note="Description of Artificial Sequence: Synthetic peptide"
QQLKDYPIT

SEQ ID NO: 1072 - protein, 8 aa, Artificial Sequence
  source: /note="Description of Artificial Sequence: Synthetic peptide"
GFSLSHFS

SEQ ID NO: 1073 - protein, 8 aa, Artificial Sequence
  source: /note="Description of Artificial Sequence: Synthetic peptide"
FDPEEGGT

SEQ ID NO: 1074 - protein, 14 aa, Artificial Sequence
  source: /note="Description of Artificial Sequence: Synthetic peptide"
ATGIWYSSGWPVDY

SEQ ID NO: 1075 - protein, 11 aa, Artificial Sequence
  source: /note="Description of Artificial Sequence: Synthetic peptide"
QSLLDSSGYNY

SEQ ID NO: 1076 - protein, 3 aa, Artificial Sequence
  source: /note="Description of Artificial Sequence: Synthetic peptide"
LGS

SEQ ID NO: 1077 - protein, 9 aa, Artificial Sequence
  source: /note="Description of Artificial Sequence: Synthetic peptide"
MQALQTPIT

SEQ ID NO: 1078 - protein, 8 aa, Artificial Sequence
  source: /note="Description of Artificial Sequence: Synthetic peptide"
GYTLTELS

SEQ ID NO: 1079 - protein, 8 aa, Artificial Sequence
  source: /note="Description of Artificial Sequence: Synthetic peptide"
FDPEDGET

SEQ ID NO: 1080 - protein, 18 aa, Artificial Sequence
  source: /note="Description of Artificial Sequence: Synthetic peptide"
ATVSRVRGVINYYYYMDV

SEQ ID NO: 1081 - protein, 11 aa, Artificial Sequence
  source: /note="Description of Artificial Sequence: Synthetic peptide"
QSLLYRNGNNY

SEQ ID NO: 1082 - protein, 3 aa, Artificial Sequence
  source: /note="Description of Artificial Sequence: Synthetic peptide"
LGS

SEQ ID NO: 1083 - protein, 9 aa, Artificial Sequence
  source: /note="Description of Artificial Sequence: Synthetic peptide"
MQALQTPPT

SEQ ID NO: 1084 - protein, 8 aa, Artificial Sequence
  source: /note="Description of Artificial Sequence: Synthetic peptide"
GGTFSSSA

SEQ ID NO: 1085 - protein, 8 aa, Artificial Sequence
  source: /note="Description of Artificial Sequence: Synthetic peptide"
IIPIYGIT

SEQ ID NO: 1086 - protein, 22 aa, Artificial Sequence
  source: /note="Description of Artificial Sequence: Synthetic peptide"
ARDDTARRVRGVPYYYYYAMDV

SEQ ID NO: 1087 - protein, 6 aa, Artificial Sequence
  source: /note="Description of Artificial Sequence: Synthetic peptide"
QSVDSS

SEQ ID NO: 1088 - protein, 3 aa, Artificial Sequence
  source: /note="Description of Artificial Sequence: Synthetic peptide"
DAS

SEQ ID NO: 1089 - protein, 9 aa, Artificial Sequence
  source: /note="Description of Artificial Sequence: Synthetic peptide"
QQYKDWPFT

SEQ ID NO: 1090 - protein, 8 aa, Artificial Sequence
  source: /note="Description of Artificial Sequence: Synthetic peptide"
GGTFGTYA

SEQ ID NO: 1091 - protein, 8 aa, Artificial Sequence
  source: /note="Description of Artificial Sequence: Synthetic peptide"
ITPISATI

SEQ ID NO: 1092 - protein, 13 aa, Artificial Sequence
  source: /note="Description of Artificial Sequence: Synthetic peptide"
ARGFEYSDGLLDD

SEQ ID NO: 1093 - protein, 12 aa, Artificial Sequence
  source: /note="Description of Artificial Sequence: Synthetic peptide"
QSLFYSDDGNTY

SEQ ID NO: 1094 - protein, 3 aa, Artificial Sequence
  source: /note="Description of Artificial Sequence: Synthetic peptide"
RLS

SEQ ID NO: 1095 - protein, 9 aa, Artificial Sequence
  source: /note="Description of Artificial Sequence: Synthetic peptide"
MQHMEFPLT

SEQ ID NO: 1096 - protein, 10 aa, Artificial Sequence
  source: /note="Description of Artificial Sequence: Synthetic peptide"
GGSISSSSYY

SEQ ID NO: 1097 - protein, 7 aa, Artificial Sequence
  source: /note="Description of Artificial Sequence: Synthetic peptide"
IYYSGST

SEQ ID NO: 1098 - protein, 15 aa, Artificial Sequence
  source: /note="Description of Artificial Sequence: Synthetic peptide"
ARGAWELRLGDWFDP

SEQ ID NO: 1099 - protein, 9 aa, Artificial Sequence
  source: /note="Description of Artificial Sequence: Synthetic peptide"
SSNIGAGYD

SEQ ID NO: 1100 - protein, 3 aa, Artificial Sequence
  source: /note="Description of Artificial Sequence: Synthetic peptide"
GNN

SEQ ID NO: 1101 - protein, 12 aa, Artificial Sequence
  source: /note="Description of Artificial Sequence: Synthetic peptide"
QSYDSSLSIYVV

SEQ ID NO: 1102 - protein, 9 aa, Artificial Sequence
  source: /note="Description of Artificial Sequence: Synthetic peptide"
SGSISSTNW

SEQ ID NO: 1103 - protein, 7 aa, Artificial Sequence
  source: /note="Description of Artificial Sequence: Synthetic peptide"
IYHSGST

SEQ ID NO: 1104 - protein, 10 aa, Artificial Sequence
  source: /note="Description of Artificial Sequence: Synthetic peptide"
ARVGPAAIYY

SEQ ID NO: 1105 - protein, 8 aa, Artificial Sequence
  source: /note="Description of Artificial Sequence: Synthetic peptide"
SNNVGYEG

SEQ ID NO: 1106 - protein, 3 aa, Artificial Sequence
  source: /note="Description of Artificial Sequence: Synthetic peptide"
RNN

SEQ ID NO: 1107 - protein, 11 aa, Artificial Sequence
  source: /note="Description of Artificial Sequence: Synthetic peptide"
SAWDSSLNAVV

SEQ ID NO: 1108 - protein, 8 aa, Artificial Sequence
  source: /note="Description of Artificial Sequence: Synthetic peptide"
GYTLTELS

SEQ ID NO: 1109 - protein, 8 aa, Artificial Sequence
  source: /note="Description of Artificial Sequence: Synthetic peptide"
FDPEDGET

SEQ ID NO: 1110 - protein, 21 aa, Artificial Sequence
  source: /note="Description of Artificial Sequence: Synthetic peptide"
ATAKPGIAVAGQNYYYYYMDV

SEQ ID NO: 1111 - protein, 11 aa, Artificial Sequence
  source: /note="Description of Artificial Sequence: Synthetic peptide"
QSLLYRNGNNY

SEQ ID NO: 1112 - protein, 3 aa, Artificial Sequence
  source: /note="Description of Artificial Sequence: Synthetic peptide"
LGS

SEQ ID NO: 1113 - protein, 9 aa, Artificial Sequence
  source: /note="Description of Artificial Sequence: Synthetic peptide"
MQALQTPPT

SEQ ID NO: 1114 - protein, 8 aa, Artificial Sequence
  source: /note="Description of Artificial Sequence: Synthetic peptide"
GFTFSSYA

SEQ ID NO: 1115 - protein, 8 aa, Artificial Sequence
  source: /note="Description of Artificial Sequence: Synthetic peptide"
ISYDGSNK

SEQ ID NO: 1116 - protein, 17 aa, Artificial Sequence
  source: /note="Description of Artificial Sequence: Synthetic peptide"
ASSPIGYSYGYWGGMDV

SEQ ID NO: 1117 - protein, 9 aa, Artificial Sequence
  source: /note="Description of Artificial Sequence: Synthetic peptide"
SGIDVRTNK

SEQ ID NO: 1118 - protein, 7 aa, Artificial Sequence
  source: /note="Description of Artificial Sequence: Synthetic peptide"
FQSDSDK

SEQ ID NO: 1119 - protein, 9 aa, Artificial Sequence
  source: /note="Description of Artificial Sequence: Synthetic peptide"
LIWHTSGWV

SEQ ID NO: 1120 - protein, 8 aa, Artificial Sequence
  source: /note="Description of Artificial Sequence: Synthetic peptide"
GYTLTELS

SEQ ID NO: 1121 - protein, 8 aa, Artificial Sequence
  source: /note="Description of Artificial Sequence: Synthetic peptide"
FDPEDGET

SEQ ID NO: 1122 - protein, 17 aa, Artificial Sequence
  source: /note="Description of Artificial Sequence: Synthetic peptide"
ATGPAAAGVGYYYYMDV

SEQ ID NO: 1123 - protein, 11 aa, Artificial Sequence
  source: /note="Description of Artificial Sequence: Synthetic peptide"
QSLLYRNGYNY

SEQ ID NO: 1124 - protein, 3 aa, Artificial Sequence
  source: /note="Description of Artificial Sequence: Synthetic peptide"
LGS

SEQ ID NO: 1125 - protein, 9 aa, Artificial Sequence
  source: /note="Description of Artificial Sequence: Synthetic peptide"
MQALQTPPT

SEQ ID NO: 1126 - protein, 8 aa, Artificial Sequence
  source: /note="Description of Artificial Sequence: Synthetic peptide"
GFTFSSYA

SEQ ID NO: 1127 - protein, 8 aa, Artificial Sequence
  source: /note="Description of Artificial Sequence: Synthetic peptide"
ISYDGSNK

SEQ ID NO: 1128 - protein, 20 aa, Artificial Sequence
  source: /note="Description of Artificial Sequence: Synthetic peptide"
ARDVMVYCSSTSCYFYGMDV

SEQ ID NO: 1129 - protein, 6 aa, Artificial Sequence
  source: /note="Description of Artificial Sequence: Synthetic peptide"
QDIRDY

SEQ ID NO: 1130 - protein, 3 aa, Artificial Sequence
  source: /note="Description of Artificial Sequence: Synthetic peptide"
DAS

SEQ ID NO: 1131 - protein, 9 aa, Artificial Sequence
  source: /note="Description of Artificial Sequence: Synthetic peptide"
QQFENLPIT

SEQ ID NO: 1132 - protein, 8 aa, Artificial Sequence
  source: /note="Description of Artificial Sequence: Synthetic peptide"
GYTLTELS

SEQ ID NO: 1133 - protein, 8 aa, Artificial Sequence
  source: /note="Description of Artificial Sequence: Synthetic peptide"
FDPEDGET

SEQ ID NO: 1134 - protein, 18 aa, Artificial Sequence
  source: /note="Description of Artificial Sequence: Synthetic peptide"
ATGGYSSGFNYYYYYMDV

SEQ ID NO: 1135 - protein, 11 aa, Artificial Sequence
  source: /note="Description of Artificial Sequence: Synthetic peptide"
QSLLYRNGNNY

SEQ ID NO: 1136 - protein, 3 aa, Artificial Sequence
  source: /note="Description of Artificial Sequence: Synthetic peptide"
LGS

SEQ ID NO: 1137 - protein, 9 aa, Artificial Sequence
  source: /note="Description of Artificial Sequence: Synthetic peptide"
MQALQTPPT

SEQ ID NO: 1138 - protein, 8 aa, Artificial Sequence
  source: /note="Description of Artificial Sequence: Synthetic peptide"
GYTLTELS

SEQ ID NO: 1139 - protein, 8 aa, Artificial Sequence
  source: /note="Description of Artificial Sequence: Synthetic peptide"
FDPEDGET

SEQ ID NO: 1140 - protein, 14 aa, Artificial Sequence
  source: /note="Description of Artificial Sequence: Synthetic peptide"
ATGVTTYYYYGMDV

SEQ ID NO: 1141 - protein, 11 aa, Artificial Sequence
  source: /note="Description of Artificial Sequence: Synthetic peptide"
QSLLYSNGNNF

SEQ ID NO: 1142 - protein, 3 aa, Artificial Sequence
  source: /note="Description of Artificial Sequence: Synthetic peptide"
LGS

SEQ ID NO: 1143 - protein, 9 aa, Artificial Sequence
  source: /note="Description of Artificial Sequence: Synthetic peptide"
MQALQTPPT

SEQ ID NO: 1144 - protein, 8 aa, Artificial Sequence
  source: /note="Description of Artificial Sequence: Synthetic peptide"
GFTFSSYG

SEQ ID NO: 1145 - protein, 8 aa, Artificial Sequence
  source: /note="Description of Artificial Sequence: Synthetic peptide"
IRYDGSNK

SEQ ID NO: 1146 - protein, 14 aa, Artificial Sequence
  source: /note="Description of Artificial Sequence: Synthetic peptide"
ARDLFDFWWDGMDV

SEQ ID NO: 1147 - protein, 7 aa, Artificial Sequence
  source: /note="Description of Artificial Sequence: Synthetic peptide"
QSVSSMY

SEQ ID NO: 1148 - protein, 3 aa, Artificial Sequence
  source: /note="Description of Artificial Sequence: Synthetic peptide"
GAS

SEQ ID NO: 1149 - protein, 10 aa, Artificial Sequence
  source: /note="Description of Artificial Sequence: Synthetic peptide"
QQYVSSPMYT

SEQ ID NO: 1150 - protein, 8 aa, Artificial Sequence
  source: /note="Description of Artificial Sequence: Synthetic peptide"
GGTFSSSA

SEQ ID NO: 1151 - protein, 8 aa, Artificial Sequence
  source: /note="Description of Artificial Sequence: Synthetic peptide"
IIPIYGIT

SEQ ID NO: 1152 - protein, 22 aa, Artificial Sequence
  source: /note="Description of Artificial Sequence: Synthetic peptide"
ARDDTARRVRGVPYYYYYAMDV

SEQ ID NO: 1153 - protein, 6 aa, Artificial Sequence
  source: /note="Description of Artificial Sequence: Synthetic peptide"
QSVSSY

SEQ ID NO: 1154 - protein, 3 aa, Artificial Sequence
  source: /note="Description of Artificial Sequence: Synthetic peptide"
DAS

SEQ ID NO: 1155 - protein, 9 aa, Artificial Sequence
  source: /note="Description of Artificial Sequence: Synthetic peptide"
QQYDDWPQT

SEQ ID NO: 1156 - protein, 8 aa, Artificial Sequence
  source: /note="Description of Artificial Sequence: Synthetic peptide"
GGTFNNYG

SEQ ID NO: 1157 - protein, 8 aa, Artificial Sequence
  source: /note="Description of Artificial Sequence: Synthetic peptide"
IIPLFGTT

SEQ ID NO: 1158 - protein, 15 aa, Artificial Sequence
  source: /note="Description of Artificial Sequence: Synthetic peptide"
ARDRMAADGMAVFDY

SEQ ID NO: 1159 - protein, 8 aa, Artificial Sequence
  source: /note="Description of Artificial Sequence: Synthetic peptide"
SSNIGRHF

SEQ ID NO: 1160 - protein, 3 aa, Artificial Sequence
  source: /note="Description of Artificial Sequence: Synthetic peptide"
KND

SEQ ID NO: 1161 - protein, 11 aa, Artificial Sequence
  source: /note="Description of Artificial Sequence: Synthetic peptide"
SSWDAALNGVV

SEQ ID NO: 1162 - protein, 8 aa, Artificial Sequence
  source: /note="Description of Artificial Sequence: Synthetic peptide"
GYTLTELS

SEQ ID NO: 1163 - protein, 8 aa, Artificial Sequence
  source: /note="Description of Artificial Sequence: Synthetic peptide"
FDPEDGET

SEQ ID NO: 1164 - protein, 19 aa, Artificial Sequence
  source: /note="Description of Artificial Sequence: Synthetic peptide"
ATEVPMVRGARRYYYYMDV

SEQ ID NO: 1165 - protein, 11 aa, Artificial Sequence
  source: /note="Description of Artificial Sequence: Synthetic peptide"
QTLLYINENNY

SEQ ID NO: 1166 - protein, 3 aa, Artificial Sequence
  source: /note="Description of Artificial Sequence: Synthetic peptide"
LGS

SEQ ID NO: 1167 - protein, 9 aa, Artificial Sequence
  source: /note="Description of Artificial Sequence: Synthetic peptide"
MQGLQTPPT

SEQ ID NO: 1168 - protein, 10 aa, Artificial Sequence
  source: /note="Description of Artificial Sequence: Synthetic peptide"
GGSISNSNYY

SEQ ID NO: 1169 - protein, 7 aa, Artificial Sequence
  source: /note="Description of Artificial Sequence: Synthetic peptide"
IYYSGST

SEQ ID NO: 1170 - protein, 15 aa, Artificial Sequence
  source: /note="Description of Artificial Sequence: Synthetic peptide"
ARGAWELSLGDWFDP

SEQ ID NO: 1171 - protein, 9 aa, Artificial Sequence
  source: /note="Description of Artificial Sequence: Synthetic peptide"
SSNIGAGYD

SEQ ID NO: 1172 - protein, 3 aa, Artificial Sequence
  source: /note="Description of Artificial Sequence: Synthetic peptide"
GNN

SEQ ID NO: 1173 - protein, 12 aa, Artificial Sequence
  source: /note="Description of Artificial Sequence: Synthetic peptide"
QSYDSSLSVYVV

SEQ ID NO: 1174 - protein, 8 aa, Artificial Sequence
  source: /note="Description of Artificial Sequence: Synthetic peptide"
GGTFSSSA

SEQ ID NO: 1175 - protein, 8 aa, Artificial Sequence
  source: /note="Description of Artificial Sequence: Synthetic peptide"
IIPIYGIT

SEQ ID NO: 1176 - protein, 22 aa, Artificial Sequence
  source: /note="Description of Artificial Sequence: Synthetic peptide"
ARDDTARRVRGVPYYYYYAMDV

SEQ ID NO: 1177 - protein, 6 aa, Artificial Sequence
  source: /note="Description of Artificial Sequence: Synthetic peptide"
QNVYGE

SEQ ID NO: 1178 - protein, 3 aa, Artificial Sequence
  source: /note="Description of Artificial Sequence: Synthetic peptide"
DTF

SEQ ID NO: 1179 - protein, 9 aa, Artificial Sequence
  source: /note="Description of Artificial Sequence: Synthetic peptide"
QQRRDWPIT

SEQ ID NO: 1180 - protein, 8 aa, Artificial Sequence
  source: /note="Description of Artificial Sequence: Synthetic peptide"
GFTFGTSS

SEQ ID NO: 1181 - protein, 8 aa, Artificial Sequence
  source: /note="Description of Artificial Sequence: Synthetic peptide"
ISFDGTEI

SEQ ID NO: 1182 - protein, 15 aa, Artificial Sequence
  source: /note="Description of Artificial Sequence: Synthetic peptide"
AKGSGNIYFYSGMDV

SEQ ID NO: 1183 - protein, 6 aa, Artificial Sequence
  source: /note="Description of Artificial Sequence: Synthetic peptide"
QSISGW

SEQ ID NO: 1184 - protein, 3 aa, Artificial Sequence
  source: /note="Description of Artificial Sequence: Synthetic peptide"
ETS

SEQ ID NO: 1185 - protein, 9 aa, Artificial Sequence
  source: /note="Description of Artificial Sequence: Synthetic peptide"
QQYYSYPLT

SEQ ID NO: 1186 - protein, 8 aa, Artificial Sequence
  source: /note="Description of Artificial Sequence: Synthetic peptide"
GYTLTELS

SEQ ID NO: 1187 - protein, 8 aa, Artificial Sequence
  source: /note="Description of Artificial Sequence: Synthetic peptide"
FDPEDGET

SEQ ID NO: 1188 - protein, 19 aa, Artificial Sequence
  source: /note="Description of Artificial Sequence: Synthetic peptide"
ATGVPAAIGVYYYYYYMDV

SEQ ID NO: 1189 - protein, 11 aa, Artificial Sequence
  source: /note="Description of Artificial Sequence: Synthetic peptide"
QSLLYSNGYNY

SEQ ID NO: 1190 - protein, 3 aa, Artificial Sequence
  source: /note="Description of Artificial Sequence: Synthetic peptide"
LGS

SEQ ID NO: 1191 - protein, 9 aa, Artificial Sequence
  source: /note="Description of Artificial Sequence: Synthetic peptide"
MQALQSPVT

SEQ ID NO: 1192 - protein, 8 aa, Artificial Sequence
  source: /note="Description of Artificial Sequence: Synthetic peptide"
GYTLTELS

SEQ ID NO: 1193 - protein, 8 aa, Artificial Sequence
  source: /note="Description of Artificial Sequence: Synthetic peptide"
FDPEDGET

SEQ ID NO: 1194 - protein, 20 aa, Artificial Sequence
  source: /note="Description of Artificial Sequence: Synthetic peptide"
ATDSRDGPAARGGYYYYMDV

SEQ ID NO: 1195 - protein, 11 aa, Artificial Sequence
  source: /note="Description of Artificial Sequence: Synthetic peptide"
QSLLYINGYNY

SEQ ID NO: 1196 - protein, 3 aa, Artificial Sequence
  source: /note="Description of Artificial Sequence: Synthetic peptide"
LGS

SEQ ID NO: 1197 - protein, 9 aa, Artificial Sequence
  source: /note="Description of Artificial Sequence: Synthetic peptide"
MQALQTPPT

SEQ ID NO: 1198 - protein, 8 aa, Artificial Sequence
  source: /note="Description of Artificial Sequence: Synthetic peptide"
GGTFSSYA

SEQ ID NO: 1199 - protein, 8 aa, Artificial Sequence
  source: /note="Description of Artificial Sequence: Synthetic peptide"
IIPIFGTA

SEQ ID NO: 1200 - protein, 20 aa, Artificial Sequence
  source: /note="Description of Artificial Sequence: Synthetic peptide"
ARDAYYYDSSGYYNPDAFDI

SEQ ID NO: 1201 - protein, 11 aa, Artificial Sequence
  source: /note="Description of Artificial Sequence: Synthetic peptide"
QSLLHSNGYNY

SEQ ID NO: 1202 - protein, 3 aa, Artificial Sequence
  source: /note="Description of Artificial Sequence: Synthetic peptide"
LGS

SEQ ID NO: 1203 - protein, 9 aa, Artificial Sequence
  source: /note="Description of Artificial Sequence: Synthetic peptide"
MQGLQTPRT

SEQ ID NO: 1204 - protein, 10 aa, Artificial Sequence
  source: /note="Description of Artificial Sequence: Synthetic peptide"
GFSLTSGGMS

SEQ ID NO: 1205 - protein, 7 aa, Artificial Sequence
  source: /note="Description of Artificial Sequence: Synthetic peptide"
IDWNDDK

SEQ ID NO: 1206 - protein, 12 aa, Artificial Sequence
  source: /note="Description of Artificial Sequence: Synthetic peptide"
ARIRGMTWGFDS

SEQ ID NO: 1207 - protein, 7 aa, Artificial Sequence
  source: /note="Description of Artificial Sequence: Synthetic peptide"
QSVSSSY

SEQ ID NO: 1208 - protein, 3 aa, Artificial Sequence
  source: /note="Description of Artificial Sequence: Synthetic peptide"
GAS

SEQ ID NO: 1209 - protein, 9 aa, Artificial Sequence
  source: /note="Description of Artificial Sequence: Synthetic peptide"
QQYGTTPFA

SEQ ID NO: 1210 - protein, 8 aa, Artificial Sequence
  source: /note="Description of Artificial Sequence: Synthetic peptide"
GYTFTAYY

SEQ ID NO: 1211 - protein, 8 aa, Artificial Sequence
  source: /note="Description of Artificial Sequence: Synthetic peptide"
INPNSGGT

SEQ ID NO: 1212 - protein, 21 aa, Artificial Sequence
  source: /note="Description of Artificial Sequence: Synthetic peptide"
ARDGAFYYGSENYYNAGWFDP

SEQ ID NO: 1213 - protein, 11 aa, Artificial Sequence
  source: /note="Description of Artificial Sequence: Synthetic peptide"
QSLLSGNGYNY

SEQ ID NO: 1214 - protein, 3 aa, Artificial Sequence
  source: /note="Description of Artificial Sequence: Synthetic peptide"
LGS

SEQ ID NO: 1215 - protein, 9 aa, Artificial Sequence
  source: /note="Description of Artificial Sequence: Synthetic peptide"
MQALKSPLT

SEQ ID NO: 1216 - protein, 8 aa, Artificial Sequence
  source: /note="Description of Artificial Sequence: Synthetic peptide"
GYTFTNYY

SEQ ID NO: 1217 - protein, 8 aa, Artificial Sequence
  source: /note="Description of Artificial Sequence: Synthetic peptide"
INPSGGIT

SEQ ID NO: 1218 - protein, 18 aa, Artificial Sequence
  source: /note="Description of Artificial Sequence: Synthetic peptide"
ARAGLGYNWNYAPSGMDV

SEQ ID NO: 1219 - protein, 9 aa, Artificial Sequence
  source: /note="Description of Artificial Sequence: Synthetic peptide"
SSDVGGYNY

SEQ ID NO: 1220 - protein, 3 aa, Artificial Sequence
  source: /note="Description of Artificial Sequence: Synthetic peptide"
EVS

SEQ ID NO: 1221 - protein, 10 aa, Artificial Sequence
  source: /note="Description of Artificial Sequence: Synthetic peptide"
SSYAGSNNLV

SEQ ID NO: 1222 - protein, 10 aa, Artificial Sequence
  source: /note="Description of Artificial Sequence: Synthetic peptide"
GGSISSSSYY

SEQ ID NO: 1223 - protein, 7 aa, Artificial Sequence
  source: /note="Description of Artificial Sequence: Synthetic peptide"
IYYSGST

SEQ ID NO: 1224 - protein, 15 aa, Artificial Sequence
  source: /note="Description of Artificial Sequence: Synthetic peptide"
ARGAWELRLGDWFDP

SEQ ID NO: 1225 - protein, 9 aa, Artificial Sequence
  source: /note="Description of Artificial Sequence: Synthetic peptide"
SSNIGAGYD

SEQ ID NO: 1226 - protein, 3 aa, Artificial Sequence
  source: /note="Description of Artificial Sequence: Synthetic peptide"
GYS

SEQ ID NO: 1227 - protein, 12 aa, Artificial Sequence
  source: /note="Description of Artificial Sequence: Synthetic peptide"
QSYDSSLSVYVV

SEQ ID NO: 1228 - protein, 8 aa, Artificial Sequence
  source: /note="Description of Artificial Sequence: Synthetic peptide"
GFTFDDYA

SEQ ID NO: 1229 - protein, 8 aa, Artificial Sequence
  source: /note="Description of Artificial Sequence: Synthetic peptide"
ISWNSGSI

SEQ ID NO: 1230 - protein, 15 aa, Artificial Sequence
  source: /note="Description of Artificial Sequence: Synthetic peptide"
AKDVNRILVAGMVDY

SEQ ID NO: 1231 - protein, 11 aa, Artificial Sequence
  source: /note="Description of Artificial Sequence: Synthetic peptide"
QSLLHSNGYNY

SEQ ID NO: 1232 - protein, 3 aa, Artificial Sequence
  source: /note="Description of Artificial Sequence: Synthetic peptide"
LGS

SEQ ID NO: 1233 - protein, 9 aa, Artificial Sequence
  source: /note="Description of Artificial Sequence: Synthetic peptide"
MQGLQTPIT

SEQ ID NO: 1234 - protein, 8 aa, Artificial Sequence
  source: /note="Description of Artificial Sequence: Synthetic peptide"
RFTFEDYA

SEQ ID NO: 1235 - protein, 8 aa, Artificial Sequence
  source: /note="Description of Artificial Sequence: Synthetic peptide"
ISWKSGGI

SEQ ID NO: 1236 - protein, 15 aa, Artificial Sequence
  source: /note="Description of Artificial Sequence: Synthetic peptide"
VKDPTLVATDRAFNI

SEQ ID NO: 1237 - protein, 11 aa, Artificial Sequence
  source: /note="Description of Artificial Sequence: Synthetic peptide"
QSLLHSNGYNY

SEQ ID NO: 1238 - protein, 3 aa, Artificial Sequence
  source: /note="Description of Artificial Sequence: Synthetic peptide"
LGS

SEQ ID NO: 1239 - protein, 9 aa, Artificial Sequence
  source: /note="Description of Artificial Sequence: Synthetic peptide"
MQYLQTPDT

SEQ ID NO: 1240 - protein, 8 aa, Artificial Sequence
  source: /note="Description of Artificial Sequence: Synthetic peptide"
GGTFSSSA

SEQ ID NO: 1241 - protein, 8 aa, Artificial Sequence
  source: /note="Description of Artificial Sequence: Synthetic peptide"
IIPIYGIT

SEQ ID NO: 1242 - protein, 22 aa, Artificial Sequence
  source: /note="Description of Artificial Sequence: Synthetic peptide"
ARDDTARRVRGVPYYYYYAMDV

SEQ ID NO: 1243 - protein, 12 aa, Artificial Sequence
  source: /note="Description of Artificial Sequence: Synthetic peptide"
QSLLDSDDGNIH

SEQ ID NO: 1244 - protein, 3 aa, Artificial Sequence
  source: /note="Description of Artificial Sequence: Synthetic peptide"
TLS

SEQ ID NO: 1245 - protein, 9 aa, Artificial Sequence
  source: /note="Description of Artificial Sequence: Synthetic peptide"
MQRKEFPLT

SEQ ID NO: 1246 - protein, 8 aa, Artificial Sequence
  source: /note="Description of Artificial Sequence: Synthetic peptide"
GFTFSSYG

SEQ ID NO: 1247 - protein, 8 aa, Artificial Sequence
  source: /note="Description of Artificial Sequence: Synthetic peptide"
ISYDGSNK

SEQ ID NO: 1248 - protein, 18 aa, Artificial Sequence
  source: /note="Description of Artificial Sequence: Synthetic peptide"
AKEDRLRFLEWLFYGMDV

SEQ ID NO: 1249 - protein, 6 aa, Artificial Sequence
  source: /note="Description of Artificial Sequence: Synthetic peptide"
HDIYTY

SEQ ID NO: 1250 - protein, 3 aa, Artificial Sequence
  source: /note="Description of Artificial Sequence: Synthetic peptide"
DAS

SEQ ID NO: 1251 - protein, 11 aa, Artificial Sequence
  source: /note="Description of Artificial Sequence: Synthetic peptide"
QQYDNHPPEVT

SEQ ID NO: 1252 - protein, 8 aa, Artificial Sequence
  source: /note="Description of Artificial Sequence: Synthetic peptide"
GGTFSSSA

SEQ ID NO: 1253 - protein, 8 aa, Artificial Sequence
  source: /note="Description of Artificial Sequence: Synthetic peptide"
IIPIYGIT

SEQ ID NO: 1254 - protein, 22 aa, Artificial Sequence
  source: /note="Description of Artificial Sequence: Synthetic peptide"
ARDDTARRVRGVPYYYYYAMDV

SEQ ID NO: 1255 - protein, 6 aa, Artificial Sequence
  source: /note="Description of Artificial Sequence: Synthetic peptide"
QDIDDD

SEQ ID NO: 1256 - protein, 3 aa, Artificial Sequence
  source: /note="Description of Artificial Sequence: Synthetic peptide"
EAS

SEQ ID NO: 1257 - protein, 9 aa, Artificial Sequence
  source: /note="Description of Artificial Sequence: Synthetic peptide"
LQHDNLPLT

SEQ ID NO: 1258 - protein, 8 aa, Artificial Sequence
  source: /note="Description of Artificial Sequence: Synthetic peptide"
GYTLTELS

SEQ ID NO: 1259 - protein, 8 aa, Artificial Sequence
  source: /note="Description of Artificial Sequence: Synthetic peptide"
FDPEDGET

SEQ ID NO: 1260 - protein, 19 aa, Artificial Sequence
  source: /note="Description of Artificial Sequence: Synthetic peptide"
ATEDPGPVAGPYYYYGMDV

SEQ ID NO: 1261 - protein, 11 aa, Artificial Sequence
  source: /note="Description of Artificial Sequence: Synthetic peptide"
QSLLYINGYHY

SEQ ID NO: 1262 - protein, 3 aa, Artificial Sequence
  source: /note="Description of Artificial Sequence: Synthetic peptide"
LGS

SEQ ID NO: 1263 - protein, 9 aa, Artificial Sequence
  source: /note="Description of Artificial Sequence: Synthetic peptide"
MQALQTPPT

SEQ ID NO: 1264 - protein, 8 aa, Artificial Sequence
  source: /note="Description of Artificial Sequence: Synthetic peptide"
GYMFTNYP

SEQ ID NO: 1265 - protein, 8 aa, Artificial Sequence
  source: /note="Description of Artificial Sequence: Synthetic peptide"
INAGTGNT

SEQ ID NO: 1266 - protein, 21 aa, Artificial Sequence
  source: /note="Description of Artificial Sequence: Synthetic peptide"
AREGMFYYGLESYYKGGWFDP

SEQ ID NO: 1267 - protein, 11 aa, Artificial Sequence
  source: /note="Description of Artificial Sequence: Synthetic peptide"
QSLLHRNGYNY

SEQ ID NO: 1268 - protein, 3 aa, Artificial Sequence
  source: /note="Description of Artificial Sequence: Synthetic peptide"
LAS

SEQ ID NO: 1269 - protein, 9 aa, Artificial Sequence
  source: /note="Description of Artificial Sequence: Synthetic peptide"
MQALQTPLT

SEQ ID NO: 1270 - protein, 8 aa, Artificial Sequence
  source: /note="Description of Artificial Sequence: Synthetic peptide"
GGTFSSSA

SEQ ID NO: 1271 - protein, 8 aa, Artificial Sequence
  source: /note="Description of Artificial Sequence: Synthetic peptide"
IIPIYGIT

SEQ ID NO: 1272 - protein, 22 aa, Artificial Sequence
  source: /note="Description of Artificial Sequence: Synthetic peptide"
ARDDTARRVRGVPYYYYYAMDV

SEQ ID NO: 1273 - protein, 12 aa, Artificial Sequence
  source: /note="Description of Artificial Sequence: Synthetic peptide"
QSLLDSDDGNTY

SEQ ID NO: 1274 - protein, 3 aa, Artificial Sequence
  source: /note="Description of Artificial Sequence: Synthetic peptide"
TLS

SEQ ID NO: 1275 - protein, 9 aa, Artificial Sequence
  source: /note="Description of Artificial Sequence: Synthetic peptide"
MQRLQFPLT

SEQ ID NO: 1276 - protein, 8 aa, Artificial Sequence
  source: /note="Description of Artificial Sequence: Synthetic peptide"
TYTFTTYY

SEQ ID NO: 1277 - protein, 8 aa, Artificial Sequence
  source: /note="Description of Artificial Sequence: Synthetic peptide"
IYPSGGNT

SEQ ID NO: 1278 - protein, 13 aa, Artificial Sequence
  source: /note="Description of Artificial Sequence: Synthetic peptide"
VRDQNYYYSAMDV

SEQ ID NO: 1279 - protein, 6 aa, Artificial Sequence
  source: /note="Description of Artificial Sequence: Synthetic peptide"
QDIRNY

SEQ ID NO: 1280 - protein, 3 aa, Artificial Sequence
  source: /note="Description of Artificial Sequence: Synthetic peptide"
DAS

SEQ ID NO: 1281 - protein, 9 aa, Artificial Sequence
  source: /note="Description of Artificial Sequence: Synthetic peptide"
QQFENLPIT

SEQ ID NO: 1282 - protein, 8 aa, Artificial Sequence
  source: /note="Description of Artificial Sequence: Synthetic peptide"
GGTFSSSA

SEQ ID NO: 1283 - protein, 8 aa, Artificial Sequence
  source: /note="Description of Artificial Sequence: Synthetic peptide"
IIPIYGIT

SEQ ID NO: 1284 - protein, 22 aa, Artificial Sequence
  source: /note="Description of Artificial Sequence: Synthetic peptide"
ARDDTARRVRGVPYYYYYAMDV

SEQ ID NO: 1285 - protein, 6 aa, Artificial Sequence
  source: /note="Description of Artificial Sequence: Synthetic peptide"
RDISDS

SEQ ID NO: 1286 - protein, 3 aa, Artificial Sequence
  source: /note="Description of Artificial Sequence: Synthetic peptide"
DAS

SEQ ID NO: 1287 - protein, 9 aa, Artificial Sequence
  source: /note="Description of Artificial Sequence: Synthetic peptide"
HQYDNLPLT

SEQ ID NO: 1288 - protein, 8 aa, Artificial Sequence
  source: /note="Description of Artificial Sequence: Synthetic peptide"
GFNFRGYA

SEQ ID NO: 1289 - protein, 8 aa, Artificial Sequence
  source: /note="Description of Artificial Sequence: Synthetic peptide"
ISGSGGTT

SEQ ID NO: 1290 - protein, 15 aa, Artificial Sequence
  source: /note="Description of Artificial Sequence: Synthetic peptide"
AQSYAQIGYGGHIDH

SEQ ID NO: 1291 - protein, 9 aa, Artificial Sequence
  source: /note="Description of Artificial Sequence: Synthetic peptide"
SGIDVATYM

SEQ ID NO: 1292 - protein, 7 aa, Artificial Sequence
  source: /note="Description of Artificial Sequence: Synthetic peptide"
YKSDSDK

SEQ ID NO: 1293 - protein, 9 aa, Artificial Sequence
  source: /note="Description of Artificial Sequence: Synthetic peptide"
LIWHGSHYV

SEQ ID NO: 1294 - protein, 8 aa, Artificial Sequence
  source: /note="Description of Artificial Sequence: Synthetic peptide"
GYTLTELS

SEQ ID NO: 1295 - protein, 8 aa, Artificial Sequence
  source: /note="Description of Artificial Sequence: Synthetic peptide"
FDPEDGET

SEQ ID NO: 1296 - protein, 19 aa, Artificial Sequence
  source: /note="Description of Artificial Sequence: Synthetic peptide"
ATGVPAAIGVYYYYYYMDV

SEQ ID NO: 1297 - protein, 11 aa, Artificial Sequence
  source: /note="Description of Artificial Sequence: Synthetic peptide"
QSLLYRNGYNY

SEQ ID NO: 1298 - protein, 3 aa, Artificial Sequence
  source: /note="Description of Artificial Sequence: Synthetic peptide"
WGS

SEQ ID NO: 1299 - protein, 9 aa, Artificial Sequence
  source: /note="Description of Artificial Sequence: Synthetic peptide"
MQAVQNPPT

SEQ ID NO: 1300 - protein, 8 aa, Artificial Sequence
  source: /note="Description of Artificial Sequence: Synthetic peptide"
GGTFSSSA

SEQ ID NO: 1301 - protein, 8 aa, Artificial Sequence
  source: /note="Description of Artificial Sequence: Synthetic peptide"
IIPIYGIT

SEQ ID NO: 1302 - protein, 22 aa, Artificial Sequence
  source: /note="Description of Artificial Sequence: Synthetic peptide"
ARDDTARRVRGVPYYYYYAMDV

SEQ ID NO: 1303 - protein, 6 aa, Artificial Sequence
  source: /note="Description of Artificial Sequence: Synthetic peptide"
QNIDSS

SEQ ID NO: 1304 - protein, 3 aa, Artificial Sequence
  source: /note="Description of Artificial Sequence: Synthetic peptide"
YAS

SEQ ID NO: 1305 - protein, 9 aa, Artificial Sequence
  source: /note="Description of Artificial Sequence: Synthetic peptide"
HQSSSLPLT

SEQ ID NO: 1306 - protein, 8 aa, Artificial Sequence
  source: /note="Description of Artificial Sequence: Synthetic peptide"
GGTFSSSA

SEQ ID NO: 1307 - protein, 8 aa, Artificial Sequence
  source: /note="Description of Artificial Sequence: Synthetic peptide"
IIPIYGIT

SEQ ID NO: 1308 - protein, 22 aa, Artificial Sequence
  source: /note="Description of Artificial Sequence: Synthetic peptide"
ARDDTARRVRGVPYYYYYAMDV

SEQ ID NO: 1309 - protein, 7 aa, Artificial Sequence
  source: /note="Description of Artificial Sequence: Synthetic peptide"
QSVYNNY

SEQ ID NO: 1310 - protein, 3 aa, Artificial Sequence
  source: /note="Description of Artificial Sequence: Synthetic peptide"
DAS

SEQ ID NO: 1311 - protein, 10 aa, Artificial Sequence
  source: /note="Description of Artificial Sequence: Synthetic peptide"
QQYNSWPPYT

SEQ ID NO: 1312 - protein, 8 aa, Artificial Sequence
  source: /note="Description of Artificial Sequence: Synthetic peptide"
GGTFSSYA

SEQ ID NO: 1313 - protein, 8 aa, Artificial Sequence
  source: /note="Description of Artificial Sequence: Synthetic peptide"
IIPIFGTA

SEQ ID NO: 1314 - protein, 20 aa, Artificial Sequence
  source: /note="Description of Artificial Sequence: Synthetic peptide"
ARDAYYYDSSGYYNPDAFDI

SEQ ID NO: 1315 - protein, 11 aa, Artificial Sequence
  source: /note="Description of Artificial Sequence: Synthetic peptide"
QSLLYSNGYNY

SEQ ID NO: 1316 - protein, 3 aa, Artificial Sequence
  source: /note="Description of Artificial Sequence: Synthetic peptide"
LGS

SEQ ID NO: 1317 - protein, 9 aa, Artificial Sequence
  source: /note="Description of Artificial Sequence: Synthetic peptide"
MQARQTPYT

SEQ ID NO: 1318 - protein, 8 aa, Artificial Sequence
  source: /note="Description of Artificial Sequence: Synthetic peptide"
GGTFSSSA

SEQ ID NO: 1319 - protein, 8 aa, Artificial Sequence
  source: /note="Description of Artificial Sequence: Synthetic peptide"
IIPIYGIT

SEQ ID NO: 1320 - protein, 22 aa, Artificial Sequence
  source: /note="Description of Artificial Sequence: Synthetic peptide"
ARDDTARRVRGVPYYYYYAMDV

SEQ ID NO: 1321 - protein, 6 aa, Artificial Sequence
  source: /note="Description of Artificial Sequence: Synthetic peptide"
ESVTTF

SEQ ID NO: 1322 - protein, 3 aa, Artificial Sequence
  source: /note="Description of Artificial Sequence: Synthetic peptide"
DAS

SEQ ID NO: 1323 - protein, 9 aa, Artificial Sequence
  source: /note="Description of Artificial Sequence: Synthetic peptide"
HQHTNWPLT

SEQ ID NO: 1324 - protein, 8 aa, Artificial Sequence
  source: /note="Description of Artificial Sequence: Synthetic peptide"
GYTLTELS

SEQ ID NO: 1325 - protein, 8 aa, Artificial Sequence
  source: /note="Description of Artificial Sequence: Synthetic peptide"
FDPEDGET

SEQ ID NO: 1326 - protein, 22 aa, Artificial Sequence
  source: /note="Description of Artificial Sequence: Synthetic peptide"
ATEVGYCSGGSCYISYYYGMDV

SEQ ID NO: 1327 - protein, 11 aa, Artificial Sequence
  source: /note="Description of Artificial Sequence: Synthetic peptide"
QSLLYRNGHNF

SEQ ID NO: 1328 - protein, 3 aa, Artificial Sequence
  source: /note="Description of Artificial Sequence: Synthetic peptide"
LGS

SEQ ID NO: 1329 - protein, 9 aa, Artificial Sequence
  source: /note="Description of Artificial Sequence: Synthetic peptide"
MQALQTPPT

SEQ ID NO: 1330 - protein, 8 aa, Artificial Sequence
  source: /note="Description of Artificial Sequence: Synthetic peptide"
GGTFSSSA

SEQ ID NO: 1331 - protein, 8 aa, Artificial Sequence
  source: /note="Description of Artificial Sequence: Synthetic peptide"
IIPIYGIT

SEQ ID NO: 1332 - protein, 22 aa, Artificial Sequence
  source: /note="Description of Artificial Sequence: Synthetic peptide"
ARDDTARRVRGVPYYYYYAMDV

SEQ ID NO: 1333 - protein, 6 aa, Artificial Sequence
  source: /note="Description of Artificial Sequence: Synthetic peptide"
QTMNNY

SEQ ID NO: 1334 - protein, 3 aa, Artificial Sequence
  source: /note="Description of Artificial Sequence: Synthetic peptide"
DAS

SEQ ID NO: 1335 - protein, 10 aa, Artificial Sequence
  source: /note="Description of Artificial Sequence: Synthetic peptide"
QQYGDWLPIT

SEQ ID NO: 1336 - protein, 8 aa, Artificial Sequence
  source: /note="Description of Artificial Sequence: Synthetic peptide"
GYTLTELS

SEQ ID NO: 1337 - protein, 8 aa, Artificial Sequence
  source: /note="Description of Artificial Sequence: Synthetic peptide"
FDPEDGET

SEQ ID NO: 1338 - protein, 17 aa, Artificial Sequence
  source: /note="Description of Artificial Sequence: Synthetic peptide"
ATAFPEATISYYYYMDV

SEQ ID NO: 1339 - protein, 11 aa, Artificial Sequence
  source: /note="Description of Artificial Sequence: Synthetic peptide"
QSLLYRNGYNY

SEQ ID NO: 1340 - protein, 3 aa, Artificial Sequence
  source: /note="Description of Artificial Sequence: Synthetic peptide"
WGS

SEQ ID NO: 1341 - protein, 9 aa, Artificial Sequence
  source: /note="Description of Artificial Sequence: Synthetic peptide"
MQAVQNPPT

SEQ ID NO: 1342 - protein, 8 aa, Artificial Sequence
  source: /note="Description of Artificial Sequence: Synthetic peptide"
GGTFSSSA

SEQ ID NO: 1343 - protein, 8 aa, Artificial Sequence
  source: /note="Description of Artificial Sequence: Synthetic peptide"
IIPIYGIT

SEQ ID NO: 1344 - protein, 22 aa, Artificial Sequence
  source: /note="Description of Artificial Sequence: Synthetic peptide"
ARDDTARRVRGVPYYYYYAMDV

SEQ ID NO: 1345 - protein, 12 aa, Artificial Sequence
  source: /note="Description of Artificial Sequence: Synthetic peptide"
RSLLDSDDGNTH

SEQ ID NO: 1346 - protein, 3 aa, Artificial Sequence
  source: /note="Description of Artificial Sequence: Synthetic peptide"
SLS

SEQ ID NO: 1347 - protein, 9 aa, Artificial Sequence
  source: /note="Description of Artificial Sequence: Synthetic peptide"
MQRKEFPLT

SEQ ID NO: 1348 - protein, 8 aa, Artificial Sequence
  source: /note="Description of Artificial Sequence: Synthetic peptide"
GGTFSSYA

SEQ ID NO: 1349 - protein, 8 aa, Artificial Sequence
  source: /note="Description of Artificial Sequence: Synthetic peptide"
IIPIFGTA

SEQ ID NO: 1350 - protein, 21 aa, Artificial Sequence
  source: /note="Description of Artificial Sequence: Synthetic peptide"
ARGPWYYDSSGYSSYAYYMDV

SEQ ID NO: 1351 - protein, 11 aa, Artificial Sequence
  source: /note="Description of Artificial Sequence: Synthetic peptide"
QSLLHSDGYNY

SEQ ID NO: 1352 - protein, 3 aa, Artificial Sequence
  source: /note="Description of Artificial Sequence: Synthetic peptide"
LGS

SEQ ID NO: 1353 - protein, 10 aa, Artificial Sequence
  source: /note="Description of Artificial Sequence: Synthetic peptide"
MQALHTPGVT

SEQ ID NO: 1354 - protein, 330 aa, Artificial Sequence [sequence omitted]

SEQ ID NO: 1355 - protein, 326 aa, Artificial Sequence
  source: /note="Description of Artificial Sequence: Synthetic polypeptide"
ASTKGPSVFPLAPCSRSTSESTAALGCLVKDYFPEPVTVSWNSGALTSGVHTFPAVLQSSGLYSLSSVVTVPSSNFGTQTYTCNVDHKPSNTKVDKTVERKCCVECPPCPAPPVAGPSVFLFPPKPKDTLMISRTPEVTCVVVDVSHEDPEVQFNWYVDGVEVHNAKTKPREEQFNSTFRVVSVLTVVHQDWLNGKEYKCKVSNKGLPAPIEKTISKTKGQPREPQVYTLPPSREEMTKNQVSLTCLVKGFYPSDIAVEWESNGQPENNYKTTPPMLDSDGSFFLYSKLTVDKSRWQQGNVFSCSVMHEALHNHYTQKSLSLSPGK

SEQ ID NO: 1356 - protein, 377 aa, Artificial Sequence
  source: /note="Description of Artificial Sequence: Synthetic polypeptide"
ASTKGPSVFPLAPCSRSTSGGTAALGCLVKDYFPEPVTVSWNSGALTSGVHTFPAVLQSSGLYSLSSVVTVPSSSLGTQTYTCNVNHKPSNTKVDKRVELKTPLGDTTHTCPRCPEPKSCDTPPPCPRCPEPKSCDTPPPCPRCPEPKSCDTPPPCPRCPAPELLGGPSVFLFPPKPKDTLMISRTPEVTCVVVDVSHEDPEVQFKWYVDGVEVHNAKTKPREEQYNSTFRVVSVLTVLHQDWLNGKEYKCKVSNKALPAPIEKTISKTKGQPREPQVYTLPPSREEMTKNQVSLTCLVKGFYPSDIAVEWESSGQPENNYNTTPPMLDSDGSFFLYSKLTVDKSRWQQGNIFSCSVMHEALHNRFTQKSLSLSPGK

SEQ ID NO: 1357 - protein, 327 aa, Artificial Sequence
  source: /note="Description of Artificial Sequence: Synthetic polypeptide"
ASTKGPSVFPLAPCSRSTSESTAALGCLVKDYFPEPVTVSWNSGALTSGVHTFPAVLQSSGLYSLSSVVTVPSSSLGTKTYTCNVDHKPSNTKVDKRVESKYGPPCPSCPAPEFLGGPSVFLFPPKPKDTLMISRTPEVTCVVVDVSQEDPEVQFNWYVDGVEVHNAKTKPREEQFNSTYRVVSVLTVLHQDWLNGKEYKCKVSNKGLPSSIEKTISKAKGQPREPQVYTLPPSQEEMTKNQVSLTCLVKGFYPSDIAVEWESNGQPENNYKTTPPVLDSDGSFFLYSRLTVDKSRWQEGNVFSCSVMHEALHNHYTQKSLSLSLGK

SEQ ID NO: 1358 - protein, 21 aa, Homo sapiens
TTLAVLHPERGIRQWAPARQA

SEQ ID NO: 1359 - protein, 34 aa, Homo sapiens
TTLAVLHPERGIRQWAPARQARWETQSSISLILE

SEQ ID NO: 1360 - protein, 17 aa, Homo sapiens
ARQARWETQSSISLILE

SEQ ID NO: 1361 - protein, 16 aa, Homo sapiens
TFCCKFASFPEGSWEA

SEQ ID NO: 1362 - protein, 24 aa, Homo sapiens
TFCCKFASFPEGSWEACGSLPPSS

SEQ ID NO: 1363 - protein, 15 aa, Homo sapiens
EATELSSFTIRCGFL

SEQ ID NO: 1364 - protein, 22 aa, Homo sapiens
EVWVQVRMEATELSSFTIRCGF

SEQ ID NO: 1365 - protein, 19 aa, Homo sapiens
FTIRCGFLGSGSISLVTVS

SEQ ID NO: 1366 - protein, 24 aa, Homo sapiens
SISLVTVSWGGPNGAGGTTLAVLH

SEQ ID NO: 1367 - protein, 26 aa, Homo sapiens
SISLILEGSGASSPCANTTFCCKFAS

SEQ ID NO: 1368 - protein, 98 aa, Artificial Sequence
  source: /note="Description of Artificial Sequence: Synthetic polypeptide"
QVQLVQSGAEVKKPGASVKVSCKASGYTFTSYYMHWVRQAPGQGLEWMGIINPSGGSTSYAQKFQGRVTMTRDTSTSTVYMELSSLRSEDTAVYYCAR

SEQ ID NO: 1369 - protein, 15 aa, Artificial Sequence
  source: /note="Description of Artificial Sequence: Synthetic peptide"
YFDYWGQGTLVTVSS

SEQ ID NO: 1370 - protein, 120 aa, Artificial Sequence; identical to SEQ ID NO: 876
  source: /note="Description of Artificial Sequence: Synthetic polypeptide"
  VARIANT (33)..(33): /replace="Gln" or "Ser" or "Ala"
  VARIANT (105)..(105): /replace="Gln" or "Ser" or "Ala"
  SITE (1)..(120): /note="Variant residues given in the sequence have no preference with respect to those in the annotations for variant positions"

SEQ ID NO: 1371 - protein, 98 aa, Artificial Sequence; identical to SEQ ID NO: 1368
  source: /note="Description of Artificial Sequence: Synthetic polypeptide"
  VARIANT (33)..(33): /replace="Gln" or "Ser" or "Ala"
  SITE (1)..(98): /note="Variant residues given in the sequence have no preference with respect to those in the annotations for variant positions"

SEQ ID NO: 1372 - protein, 120 aa, Artificial Sequence; identical to SEQ ID NO: 1052
  source: /note="Description of Artificial Sequence: Synthetic polypeptide"
  VARIANT (33)..(33): /replace="Gln" or "Ser" or "Ala"
  VARIANT (105)..(105): /replace="Gln" or "Ser" or "Ala"
  SITE (1)..(120): /note="Variant residues given in the sequence have no preference with respect to those in the annotations for variant positions"

SEQ ID NO: 1373 - protein, 120 aa, Artificial Sequence
  source: /note="Description of Artificial Sequence: Synthetic polypeptide"
  VARIANT (33)..(33): /replace="Gln" or "Ser" or "Ala"
  VARIANT (105)..(105): /replace="Gln" or "Ser" or "Ala"
  SITE (1)..(120): /note="Variant residues given in the sequence have no preference with respect to those in the annotations for variant positions"
QVQLVQSGAEVKKPGASVKVSCKASGYTFTDYNINWVRQAPGQGLEWIGYIYPYIGGSGYAQKFQGRVTMTADTSTSTVYMELSSLRSEDTAVYYCAREDKTARNAMDYWGQGTLVTVSS

SEQ ID NO: 1374 - protein, 120 aa, Artificial Sequence
  source: /note="Description of Artificial Sequence: Synthetic polypeptide"
  VARIANT (33)..(33): /replace="Gln" or "Ser" or "Ala"
  VARIANT (105)..(105): /replace="Gln" or "Ser" or "Ala"
  SITE (1)..(120): /note="Variant residues given in the sequence have no preference with respect to those in the annotations for variant positions"
QVQLVQSGAEVKKPGASVKISCKASGYTFTDYNINWVRQAPGQGLEWIGYIYPYIGGSGYAQKFQGRATLTADTSTSTAYMELSSLRSEDTAVYYCAREDKTARNAMDYWGQGTLVTVSS

SEQ ID NO: 1375 - protein, 120 aa, Artificial Sequence
  source: /note="Description of Artificial Sequence: Synthetic polypeptide"
  VARIANT (33)..(33): /replace="Gln" or "Ser" or "Ala"
  VARIANT (105)..(105): /replace="Gln" or "Ser" or "Ala"
  SITE (1)..(120): /note="Variant residues given in the sequence have no preference with respect to those in the annotations for variant positions"
QVQLVQSGAEVKKPGASVKISCKASGYTFTDYNINWVRQAPGQGLEWIGYIYPYIGGSGYAQKFQGRATLTADNSTSTAYMELSSLRSEDTAVYYCAREDKTARNAMDYWGQGTLVTVSS

SEQ ID NO: 1376 - protein, 96 aa, Artificial Sequence
  source: /note="Description of Artificial Sequence: Synthetic polypeptide"
DIQMTQSPSSLSASVGDRVTITCRASQSISSYLNWYQQKPGKAPKLLIYAASSLQSGVPSRFSGSGSGTDFTLTISSLQPEDFATYYCQQSYSTPP

SEQ ID NO: 1377 - protein, 12 aa, Artificial Sequence
  source: /note="Description of Artificial Sequence: Synthetic peptide"
YTFGQGTKLEIK

SEQ ID NO: 1378 - protein, 107 aa, Artificial Sequence; identical to SEQ ID NO: 880
  source: /note="Description of Artificial Sequence: Synthetic polypeptide"
  VARIANT (28)..(28): /replace="Gln" or "Ser" or "Ala" or "Asp"
  VARIANT (32)..(32): /replace="Gln" or "Ser" or "Ala" or "Asp"
  VARIANT (53)..(53): /replace="Gln" or "Ser" or "Ala" or "Asp"
  VARIANT (92)..(92): /replace="Tyr" or "Phe" or "His"
  SITE (1)..(107): /note="Variant residues given in the sequence have no preference with respect to those in the annotations for variant positions"

SEQ ID NO: 1379 - protein, 96 aa, Artificial Sequence
  source: /note="Description of Artificial Sequence: Synthetic polypeptide"
  VARIANT (28)..(28): /replace="Ser" or "Ala" or "Asp"
  VARIANT (32)..(32): /replace="Gln" or "Ser" or "Ala" or "Asp"
  VARIANT (53)..(53): /replace="Ser" or "Ala" or "Asp"
  VARIANT (92)..(92): /replace="Phe" or "His"
  SITE (1)..(96): /note="Variant residues given in the sequence have no preference with respect to those in the annotations for variant positions"
DIQMTQSPSSLSASVGDRVTITCRASQQISSYLNWYQQKPGKAPKLLIYAASQLQSGVPSRFSGSGSGTDFTLTISSLQPEDFATYYCQQSYSTPP

SEQ ID NO: 1380 - protein, 107 aa, Artificial Sequence
  source: /note="Description of Artificial Sequence: Synthetic polypeptide"
  VARIANT (28)..(28): /replace="Gln" or "Ser" or "Ala" or "Asp"
  VARIANT (32)..(32): /replace="Gln" or "Ser" or "Ala" or "Asp"
  VARIANT (53)..(53): /replace="Gln" or "Ser" or "Ala" or "Asp"
  VARIANT (92)..(92): /replace="Tyr" or "Phe" or "His"
  SITE (1)..(107): /note="Variant residues given in the sequence have no preference with respect to those in the annotations for variant positions"
DIQMTQSPSSLSASVGDRVTITCRVSENIYSNLAWYQQKPGKAPKLLIYEATNLAEGVPSRFSGSGSGTDFTLTISSLQPEDFATYYCQHFWGTPYTFGQGTKLEIK

SEQ ID NO: 1381 - protein, 107 aa, Artificial Sequence
  source: /note="Description of Artificial Sequence: Synthetic polypeptide"
  VARIANT (28)..(28): /replace="Gln" or "Ser" or "Ala" or "Asp"
  VARIANT (32)..(32): /replace="Gln" or "Ser" or "Ala" or "Asp"
  VARIANT (53)..(53): /replace="Gln" or "Ser" or "Ala" or "Asp"
  VARIANT (92)..(92): /replace="Tyr" or "Phe" or "His"
  SITE (1)..(107): /note="Variant residues given in the sequence have no preference with respect to those in the annotations for variant positions"
DIQMTQSPSSLSASVGDRVTITCRVSENIYSNLAWYQQKPGKAPKLLIYEATNLAEGVPSRFSGSGSGTDYTLTISSLQPEDFATYYCQHFWGTPYTFGQGTKLEIK

SEQ ID NO: 1382 - protein, 107 aa, Artificial Sequence
  source: /note="Description of Artificial Sequence: Synthetic polypeptide"
  VARIANT (28)..(28): /replace="Gln" or "Ser" or "Ala" or "Asp"
  VARIANT (32)..(32): /replace="Gln" or "Ser" or "Ala" or "Asp"
  VARIANT (53)..(53): /replace="Gln" or "Ser" or "Ala" or "Asp"
  VARIANT (92)..(92): /replace="Tyr" or "Phe" or "His"
  SITE (1)..(107): /note="Variant residues given in the sequence have no preference with respect to those in the annotations for variant positions"
DIQMTQSPSSLSASVGDRVTITCRVSENIYSNLAWYQQKPGKAPKLLVYEATNLAEGVPSRFSGSGSGTDYTLTISSLQPEDFGTYYCQHFWGTPYTFGQGTKLEIK

SEQ ID NO: 1383 - protein, 98 aa, Artificial Sequence; identical to SEQ ID NO: 1368
  source: /note="Description of Artificial Sequence: Synthetic polypeptide"

SEQ ID NO: 1384 - protein, 15 aa, Artificial Sequence
  source: /note="Description of Artificial Sequence: Synthetic peptide"
YFDYWGQGTLVTVSS

SEQ ID NO: 1385 - protein, 118 aa, Artificial Sequence; identical to SEQ ID NO: 908
  source: /note="Description of Artificial Sequence: Synthetic polypeptide"
  VARIANT (57)..(57): /replace="Gln" or "Ser" or "Ala"
  VARIANT (59)..(59): /replace="Gln" or "Ser" or "Ala"
  VARIANT (104)..(104): /replace="Leu" or "Phe" or "Ala"
  SITE (1)..(118): /note="Variant residues given in the sequence have no preference with respect to those in the annotations for variant positions"

SEQ ID NO: 1386 - protein, 98 aa, Artificial Sequence
  source: /note="Description of Artificial Sequence: Synthetic polypeptide"
  VARIANT (57)..(57): /replace="Ser" or "Ala"
  VARIANT (59)..(59): /replace="Ser" or "Ala"
  SITE (1)..(98): /note="Variant residues given in the sequence have no preference with respect to those in the annotations for variant positions"
QVQLVQSGAEVKKPGASVKVSCKASGYTFTSYYMHWVRQAPGQGLEWMGIINPSGGQTQYAQKFQGRVTMTRDTSTSTVYMELSSLRSEDTAVYYCAR

SEQ ID NO: 1387 - protein, 118 aa, Artificial Sequence
  source: /note="Description of Artificial Sequence: Synthetic polypeptide"
  VARIANT (57)..(57): /replace="Gln" or "Ser" or "Ala"
  VARIANT (59)..(59): /replace="Gln" or "Ser" or "Ala"
  VARIANT (104)..(104): /replace="Leu" or "Phe" or "Ala"
  SITE (1)..(118): /note="Variant residues given in the sequence have no preference with respect to those in the annotations for variant positions"
QVQLVQSGAEVKKPGASVKVSCKASGYKFPDYVMHWVRQAPGQGLEWMGIISIYSGNTNYAQKFQGRVTMTRDTSTSTVYMELSSLRSEDTAVYYCAREGDLPMFAYWGQGTLVTVSS

SEQ ID NO: 1388 - protein, 118 aa, Artificial Sequence
  source: /note="Description of Artificial Sequence: Synthetic polypeptide"
  VARIANT (57)..(57): /replace="Gln" or "Ser" or "Ala"
  VARIANT (59)..(59): /replace="Gln" or "Ser" or "Ala"
  VARIANT (104)..(104): /replace="Leu" or "Phe" or "Ala"
  SITE (1)..(118): /note="Variant residues given in the sequence have no preference with respect to those in the annotations for variant positions"
QVQLVQSGAEVKKPGASVKVSCKASGYKFPDYVMHWVRQAPGQGLEWIGIISIYSGNTNYAQKFQGRVTMTVDTSTSTVYMELSSLRSEDTAVYYCAREGDLPMFAYWGQGTLVTVSS

SEQ ID NO: 1389 - protein, 118 aa, Artificial Sequence
  source: /note="Description of Artificial Sequence: Synthetic polypeptide"
  VARIANT (57)..(57): /replace="Gln" or "Ser" or "Ala"
  VARIANT (59)..(59): /replace="Gln" or "Ser" or "Ala"
  VARIANT (104)..(104): /replace="Leu" or "Phe" or "Ala"
  SITE (1)..(118): /note="Variant residues given in the sequence have no preference with respect to those in the annotations for variant positions"
QVQLVQSGAEVKKPGASVKISCKGSGYKFPDYVMHWVRQAPGQGLEWIGIISIYSGNTNYAQKFQGRATMTVDTSTSTAYMELSSLRSEDTAVYYCAREGDLPMFAYWGQGTLVTVSS

SEQ ID NO: 1390 - protein, 118 aa, Artificial Sequence
  source: /note="Description of Artificial Sequence: Synthetic polypeptide"
  VARIANT (57)..(57): /replace="Gln" or "Ser" or "Ala"
  VARIANT (59)..(59): /replace="Gln" or "Ser" or "Ala"
  VARIANT (104)..(104): /replace="Leu" or "Phe" or "Ala"
  SITE (1)..(118): /note="Variant residues given in the sequence have no preference with respect to those in the annotations for variant positions"
QVQLVQSGAEVKKPGASVKISCKGSGYKFPDYVMHWVRQAPGQGLEWIGIISIYSGNTNYAQKFQGRATMTVDKSTSTAYMELSSLRSEDTAVYYCAREGDLPMFAYWGQGTLVTVSS

SEQ ID NO: 1391 - protein, 96 aa, Artificial Sequence
  source: /note="Description of Artificial Sequence: Synthetic polypeptide"
EIVLTQSPATLSLSPGERATLSCRASQSVSSYLAWYQQKPGQAPRLLIYDASNRATGIPARFSGSGSGTDFTLTISSLEPEDFAVYYCQQRSNWPP

SEQ ID NO: 1392 - protein, 12 aa, Artificial Sequence
  source: /note="Description of Artificial Sequence: Synthetic peptide"
YTFGQGTKLEIK

SEQ ID NO: 1393 - protein, 106 aa, Artificial Sequence; identical to SEQ ID NO: 912
  source: /note="Description of Artificial Sequence: Synthetic polypeptide"
  VARIANT (24)..(24): /replace="Gln" or "Ser" or "Ala" or "Asp"
  VARIANT (52)..(52): /replace="Gln" or "Ser" or "Ala" or "Asp"
  VARIANT (90)..(90): /replace="Tyr" or "Phe" or "His"
  SITE (1)..(106): /note="Variant residues given in the sequence have no preference with respect to those in the annotations for variant positions"

SEQ ID NO: 1394 - protein, 96 aa, Artificial Sequence; identical to SEQ ID NO: 1391
  source: /note="Description of Artificial Sequence: Synthetic polypeptide"
  VARIANT (24)..(24): /replace="Gln" or "Ser" or "Ala" or "Asp"
  VARIANT (53)..(53): /replace="Gln" or "Ser" or "Ala" or "Asp"
  VARIANT (91)..(91): /replace="Tyr" or "Phe" or "His"
  SITE (1)..(96): /note="Variant residues given in the sequence have no preference with respect to those in the annotations for variant positions"

SEQ ID NO: 1395 - protein, 106 aa, Artificial Sequence
  source: /note="Description of Artificial Sequence: Synthetic polypeptide"
  VARIANT (24)..(24): /replace="Gln" or "Ser" or "Ala" or "Asp"
  VARIANT (52)..(52): /replace="Gln" or "Ser" or "Ala" or "Asp"
  VARIANT (90)..(90): /replace="Tyr" or "Phe" or "His"
  SITE (1)..(106): /note="Variant residues given in the sequence have no preference with respect to those in the annotations for variant positions"
EIVLTQSPATLSLSPGERATLSCNASSSVSYMYWYQQKPGQAPRLLIYDTSNLASGIPARFSGSGSGTDFTLTISSLEPEDFAVYYCQQWSSYPLTFGQGTKLEIK

SEQ ID NO: 1396 - protein, 106 aa, Artificial Sequence
  source: /note="Description of Artificial Sequence: Synthetic polypeptide"
  VARIANT (24)..(24): /replace="Gln" or "Ser" or "Ala" or "Asp"
  VARIANT (52)..(52): /replace="Gln" or "Ser" or "Ala" or "Asp"
  VARIANT (90)..(90): /replace="Tyr" or "Phe" or "His"
  SITE (1)..(106): /note="Variant residues given in the sequence have no preference with respect to those in the annotations for variant positions"
EIVLTQSPATLSLSPGERATLSCNASSSVSYMYWYQQKPGQAPRLLIYDTSNLASGIPARFSGSGSGTDYTLTISSLEPEDFAVYYCQQWSSYPLTFGQGTKLEIK

SEQ ID NO: 1397 - protein, 106 aa, Artificial Sequence
  source: /note="Description of Artificial Sequence: Synthetic polypeptide"
  VARIANT (24)..(24): /replace="Gln" or "Ser" or "Ala" or "Asp"
  VARIANT (52)..(52): /replace="Gln" or "Ser" or "Ala" or "Asp"
  VARIANT (90)..(90): /replace="Tyr" or "Phe" or "His"
  SITE (1)..(106): /note="Variant residues given in the sequence have no preference with respect to those in the annotations for variant positions"
EIVLTQSPATLSLSPGERVTMSCNASSSVSYMYWYQQKPGQAPRLLIYDTSNLASGVPARFSGSGSGTDYTLTISSMEPEDFAVYYCQQWSSYPLTFGQGTKVEIK

SEQ ID NO: 1398 - protein, 98 aa, Artificial Sequence; identical to SEQ ID NO: 1368
  source: /note="Description of Artificial Sequence: Synthetic polypeptide"

SEQ ID NO: 1399 - protein, 15 aa, Artificial Sequence
  source: /note="Description of Artificial Sequence: Synthetic peptide"
YFDYWGQGTLVTVSS

SEQ ID NO: 1400 - protein, 119 aa, Artificial Sequence; identical to SEQ ID NO: 940
  source: /note="Description of Artificial Sequence: Synthetic polypeptide"
  VARIANT (31)..(31): /replace="Gln" or "Ser" or "Ala"
  VARIANT (52)..(52): /replace="Gln" or "Ser" or "Ala"
  VARIANT (103)..(103): /replace="Gln" or "Ser" or "Ala"
  VARIANT (105)..(105): /replace="Tyr" or "Phe" or "His"
  SITE (1)..(119): /note="Variant residues given in the sequence have no preference with respect to those in the annotations for variant positions"

SEQ ID NO: 1401 - protein, 98 aa, Artificial Sequence
  source: /note="Description of Artificial Sequence: Synthetic polypeptide"
  VARIANT (31)..(31): /replace="Ser" or "Ala"
  VARIANT (52)..(52): /replace="Gln" or "Ser" or "Ala"
  SITE (1)..(98): /note="Variant residues given in the sequence have no preference with respect to those in the annotations for variant positions"
QVQLVQSGAEVKKPGASVKVSCKASGYTFTQYYMHWVRQAPGQGLEWMGIINPSGGSTSYAQKFQGRVTMTRDTSTSTVYMELSSLRSEDTAVYYCAR

SEQ ID NO: 1402 - protein, 119 aa, Artificial Sequence
  source: /note="Description of Artificial Sequence: Synthetic polypeptide"
  VARIANT (31)..(31): /replace="Gln" or "Ser" or "Ala"
  VARIANT (52)..(52): /replace="Gln" or "Ser" or "Ala"
  VARIANT (103)..(103): /replace="Gln" or "Ser" or "Ala"
  VARIANT (105)..(105): /replace="Tyr" or "Phe" or "His"
  SITE (1)..(119): /note="Variant residues given in the sequence have no preference with respect to those in the annotations for variant positions"
QVQLVQSGAEVKKPGASVKVSCKASGYAFTNHLIEWVRQAPGQGLEWMGVINPGSDSTDYAQKFQGRVTMTRDTSTSTVYMELSSLRSEDTAVYYCARSLYYNSWFVYWGQGTLVTVSS

SEQ ID NO: 1403 - protein, 119 aa, Artificial Sequence
  source: /note="Description of Artificial Sequence: Synthetic polypeptide"
  VARIANT (31)..(31): /replace="Gln" or "Ser" or "Ala"
  VARIANT (52)..(52): /replace="Gln" or "Ser" or "Ala"
  VARIANT (103)..(103): /replace="Gln" or "Ser" or "Ala"
  VARIANT (105)..(105): /replace="Tyr" or "Phe" or "His"
  SITE (1)..(119): /note="Variant residues given in the sequence have no preference with respect to those in the annotations for variant positions"
QVQLVQSGAEVKKPGASVKVSCKASGYAFTNHLIEWVRQAPGQGLEWIGVINPGSDSTDYAQKFQGRVTMTADTSTSTVYMELSSLRSEDTAVYYCARSLYYNSWFVYWGQGTLVTVSS

SEQ ID NO: 1404 - protein, 119 aa, Artificial Sequence
  source: /note="Description of Artificial Sequence: Synthetic polypeptide"
  VARIANT (31)..(31): /replace="Gln" or "Ser" or "Ala"
  VARIANT (52)..(52): /replace="Gln" or "Ser" or "Ala"
  VARIANT (103)..(103): /replace="Gln" or "Ser" or "Ala"
  VARIANT (105)..(105): /replace="Tyr" or "Phe" or "His"
  SITE (1)..(119): /note="Variant residues given in the sequence have no preference with respect to those in the annotations for variant positions"
QVQLVQSGAEVKKPGASVKVSCKASGYAFTNHLIEWIRQAPGQGLEWIGVINPGSDSTDYAQKFQGRATLTADTSTSTAYMELSSLRSEDTAVYYCARSLYYNSWFVYWGQGTLVTVSS

SEQ ID NO: 1405 - protein, 119 aa, Artificial Sequence
  source: /note="Description of Artificial Sequence: Synthetic polypeptide"
  VARIANT (31)..(31): /replace="Gln" or "Ser" or "Ala"
  VARIANT (52)..(52): /replace="Gln" or "Ser" or "Ala"
  VARIANT (103)..(103): /replace="Gln" or "Ser" or "Ala"
  VARIANT (105)..(105): /replace="Tyr" or "Phe" or "His"
  SITE (1)..(119): /note="Variant residues given in the sequence have no preference with respect to those in the annotations for variant positions"
QVQLVQSGAEVKKPGASVKVSCKASGYAFTNHLIEWIRQAPGQGLEWIGVINPGSDSTDYAQKFQGRATLTADKSTSTAYMELSSLRSEDTAVYYCARSLYYNSWFVYWGQGTLVTVSS

SEQ ID NO: 1406 - protein, 96 aa, Artificial Sequence; identical to SEQ ID NO: 1376
  source: /note="Description of Artificial Sequence: Synthetic polypeptide"

SEQ ID NO: 1407 - protein, 12 aa, Artificial Sequence
  source: /note="Description of Artificial Sequence: Synthetic peptide"
YTFGQGTKLEIK

SEQ ID NO: 1408 - protein, 107 aa, Artificial Sequence; identical to SEQ ID NO: 944
  source: /note="Description of Artificial Sequence: Synthetic polypeptide"
  VARIANT (28)..(28): /replace="Gln" or "Ser" or "Ala" or "Asp"
  VARIANT (50)..(50): /replace="Gln" or "Ser" or "Ala" or "Asp"
  SITE (1)..(107): /note="Variant residues given in the sequence have no preference with respect to those in the annotations for variant positions"

SEQ ID NO: 1409 - protein, 96 aa, Artificial Sequence
  source: /note="Description of Artificial Sequence: Synthetic polypeptide"
  VARIANT (28)..(28): /replace="Ser" or "Ala" or "Asp"
  VARIANT (50)..(50): /replace="Ser" or "Ala" or "Asp"
  SITE (1)..(96): /note="Variant residues given in the sequence have no preference with respect to those in the annotations for variant positions"
DIQMTQSPSSLSASVGDRVTITCRASQQISSYLNWYQQKPGKAPKLLIYQASSLQSGVPSRFSGSGSGTDFTLTISSLQPEDFATYYCQQSYSTPP

SEQ ID NO: 1410 - protein, 107 aa, Artificial Sequence
  source: /note="Description of Artificial Sequence: Synthetic polypeptide"
  VARIANT (28)..(28): /replace="Gln" or "Ser" or "Ala" or "Asp"
  VARIANT (50)..(50): /replace="Gln" or "Ser" or "Ala" or "Asp"
  SITE (1)..(107): /note="Variant residues given in the sequence have no preference with respect to those in the annotations for variant positions"
DIQMTQSPSSLSASVGDRVTITCRASENIYSYLAWYQQKPGKAPKLLIYNAKTLVEGVPSRFSGSGSGTDFTLTISSLQPEDFATYYCQHHYGTPYTFGQGTKLEIK

SEQ ID NO: 1411 - protein, 107 aa, Artificial Sequence
  source: /note="Description of Artificial Sequence: Synthetic polypeptide"
  VARIANT (28)..(28): /replace="Gln" or "Ser" or "Ala" or "Asp"
  VARIANT (50)..(50): /replace="Gln" or "Ser" or "Ala" or "Asp"
  SITE (1)..(107): /note="Variant residues given in the sequence have no preference with respect to those in the annotations for variant positions"
DIQMTQSPSSLSASVGDRVTITCRASENIYSYLAWYQQKPGKAPKLLVYNAKTLVEGVPSRFSGSGSGTDFTLTISSLQPEDFGTYYCQHHYGTPYTFGQGTKLEIK

SEQ ID NO: 1412 - protein, 98 aa, Artificial Sequence; identical to SEQ ID NO: 1368
  source: /note="Description of Artificial Sequence: Synthetic polypeptide"

SEQ ID NO: 1413 - protein, 15 aa, Artificial Sequence
  source: /note="Description of Artificial Sequence: Synthetic peptide"
YFDYWGQGTLVTVSS

SEQ ID NO: 1414 - protein, 119 aa, Artificial Sequence; identical to SEQ ID NO: 972
  source: /note="Description of Artificial Sequence: Synthetic polypeptide"
  VARIANT (31)..(31): /replace="Gln" or "Ser" or "Ala"
  VARIANT (52)..(52): /replace="Gln" or "Ser" or "Ala"
  VARIANT (105)..(105): /replace="Tyr" or "Phe" or "His"
  SITE (1)..(119): /note="Variant residues given in the sequence have no preference with respect to those in the annotations for variant positions"

SEQ ID NO: 1415 - protein, 98 aa, Artificial Sequence; identical to SEQ ID NO: 1401
  source: /note="Description of Artificial Sequence: Synthetic polypeptide"
  VARIANT (31)..(31): /replace="Ser" or "Ala"
  VARIANT (52)..(52): /replace="Gln" or "Ser" or "Ala"
  SITE (1)..(98): /note="Variant residues given in the sequence have no preference with respect to those in the annotations for variant positions"

SEQ ID NO: 1416 - protein, 119 aa, Artificial Sequence
  source: /note="Description of Artificial Sequence: Synthetic polypeptide"
  VARIANT (31)..(31): /replace="Gln" or "Ser" or "Ala"
  VARIANT (52)..(52): /replace="Gln" or "Ser" or "Ala"
  VARIANT (105)..(105): /replace="Tyr" or "Phe" or "His"
  SITE (1)..(119): /note="Variant residues given in the sequence have no preference with respect to those in the annotations for variant positions"
QVQLVQSGAEVKKPGASVKVSCKASGYAFTNYLIEWVRQAPGQGLEWMGVINPGSGGIYYAQKFQGRVTMTRDTSTSTVYMELSSLRSEDTAVYYCARSETHDTWFAYWGQGTLVTVSS

SEQ ID NO: 1417 - protein, 119 aa, Artificial Sequence
  source: /note="Description of Artificial Sequence: Synthetic polypeptide"
  VARIANT (31)..(31): /replace="Gln" or "Ser" or "Ala"
  VARIANT (52)..(52): /replace="Gln" or "Ser" or "Ala"
  VARIANT (105)..(105): /replace="Tyr" or "Phe" or "His"
  SITE (1)..(119): /note="Variant residues given in the sequence have no preference with respect to those in the annotations for variant positions"
QVQLVQSGAEVKKPGASVKVSCKASGYAFTNYLIEWVRQAPGQGLEWIGVINPGSGGIYYAQKFQGRVTMTADTSTSTVYMELSSLRSEDTAVYYCARSETHDTWFAYWGQGTLVTVSS

SEQ ID NO: 1418 - protein, 119 aa, Artificial Sequence
  source: /note="Description of Artificial Sequence: Synthetic polypeptide"
  VARIANT (31)..(31): /replace="Gln" or "Ser" or "Ala"
  VARIANT (52)..(52): /replace="Gln" or "Ser" or "Ala"
  VARIANT (105)..(105): /replace="Tyr" or "Phe" or "His"
  SITE (1)..(119): /note="Variant residues given in the sequence have no preference with respect to those in the annotations for variant positions"
QVQLVQSGAEVKKPGASVKVSCKTSGYAFTNYLIEWVRQAPGQGLEWIGVINPGSGGIYYAQKFQGRVTLTADTSTSTAYMELSSLRSEDTAVYYCARSETHDTWFAYWGQGTLVTVSS

SEQ ID NO: 1419 - protein, 119 aa, Artificial Sequence
  source: /note="Description of Artificial Sequence: Synthetic polypeptide"
  VARIANT (31)..(31): /replace="Gln" or "Ser" or "Ala"
  VARIANT (52)..(52): /replace="Gln" or "Ser" or "Ala"
  VARIANT (105)..(105): /replace="Tyr" or "Phe" or "His"
  SITE (1)..(119): /note="Variant residues given in the sequence have no preference with respect to those in the annotations for variant positions"
QVQLVQSGAEVKKPGASVKVSCKTSGYAFTNYLIEWVRQAPGQGLEWIGVINPGSGGIYYAQKFQGRVTLTADKSTSTAYMELSSLRSEDTAVYYCARSETHDTWFAYWGQGTLVTVSS

SEQ ID NO: 1420 - protein, 96 aa, Artificial Sequence; identical to SEQ ID NO: 1376
  source: /note="Description of Artificial Sequence: Synthetic polypeptide"

SEQ ID NO: 1421 - protein, 12 aa, Artificial Sequence
  source: /note="Description of Artificial Sequence: Synthetic peptide"
YTFGQGTKLEIK

SEQ ID NO: 1422 - protein, 96 aa, Artificial Sequence
  source: /note="Description of Artificial Sequence: Synthetic polypeptide"
DIQMTQSPSSLSASVGDRVTITCRASQGIRNDLGWYQQKPGKAPKRLIYAASSLQSGVPSRFSGSGSGTEFTLTISNLQPEDFATYYCLQHNSYPP

SEQ ID NO: 1423 - protein, 107 aa, Artificial Sequence
  source: /note="Description of Artificial Sequence: Synthetic polypeptide"
  VARIANT (92)..(92): /replace="Tyr" or "Phe" or "His"
  VARIANT (93)..(93): /replace="Gln" or "Ser" or "Ala" or "Asp"
  SITE (1)..(107): /note="Variant residues given in the sequence have no preference with respect to those in the annotations for variant positions"
DIVMTQSQKFISTSVGDRVSITCKASQSVRIAVAWFQQKPGQSPKALIYLASTRHTGVPDRFTGSGSGTDFTLTISNVQSEDLADYFCLQHWNYPYTFGGGTKLEIK

SEQ ID NO: 1424 - protein, 96 aa, Artificial Sequence
  source: /note="Description of Artificial Sequence: Synthetic polypeptide"
  VARIANT (92)..(92): /replace="Phe" or "His"
  VARIANT (93)..(93): /replace="Ser" or "Ala" or "Asp"
  SITE (1)..(96): /note="Variant residues given in the sequence have no preference with respect to those in the annotations for variant positions"
DIQMTQSPSSLSASVGDRVTITCRASQSISSYLNWYQQKPGKAPKLLIYAASSLQSGVPSRFSGSGSGTDFTLTISSLQPEDFATYYCQQSYQTPP

SEQ ID NO: 1425 - protein, 107 aa, Artificial Sequence
  source: /note="Description of Artificial Sequence: Synthetic polypeptide"
  VARIANT (92)..(92): /replace="Tyr" or "Phe" or "His"
  VARIANT (93)..(93): /replace="Gln" or "Ser" or "Ala" or "Asp"
  SITE (1)..(107): /note="Variant residues given in the sequence have no preference with respect to those in the annotations for variant positions"
DIQMTQSPSSLSASVGDRVTITCKASQSVRIAVAWYQQKPGKAPKLLIYLASTRHTGVPSRFSGSGSGTDFTLTISSLQPEDFATYYCLQHWNYPYTFGQGTKLEIK

SEQ ID NO: 1426 - protein, 107 aa, Artificial Sequence
  source: /note="Description of Artificial Sequence: Synthetic polypeptide"
  VARIANT (92)..(92): /replace="Tyr" or "Phe" or "His"
  VARIANT (93)..(93): /replace="Gln" or "Ser" or "Ala" or "Asp"
  SITE (1)..(107): /note="Variant residues given in the sequence have no preference with respect to those in the annotations for variant positions"
DIQMTQSPSSLSASVGDRVTITCKASQSVRIAVAWFQQKPGKAPKALIYLASTRHTGVPSRFSGSGSGTDFTLTISSVQPEDFATYYCLQHWNYPYTFGQGTKLEIK

SEQ ID NO: 1427 - protein, 98 aa, Artificial Sequence; identical to SEQ ID NO: 1368
  source: /note="Description of Artificial Sequence: Synthetic polypeptide"

SEQ ID NO: 1428 - protein, 15 aa, Artificial Sequence
  source: /note="Description of Artificial Sequence: Synthetic peptide"
YFDYWGQGTLVTVSS

SEQ ID NO: 1429 - protein, 120 aa, Artificial Sequence; identical to SEQ ID NO: 980
  source: /note="Description of Artificial Sequence: Synthetic polypeptide"
  VARIANT (31)..(31): /replace="Gln" or "Ser" or "Ala"
  VARIANT (33)..(33): /replace="Tyr" or "Phe" or "His"
  VARIANT (59)..(59): /replace="Gln" or "Ser" or "Ala"
  SITE (1)..(120): /note="Variant residues given in the sequence have no preference with respect to those in the annotations for variant positions"

SEQ ID NO: 1430 - protein, 98 aa, Artificial Sequence
  source: /note="Description of Artificial Sequence: Synthetic polypeptide"
  VARIANT (31)..(31): /replace="Ser" or "Ala"
  VARIANT (33)..(33): /replace="Phe" or "His"
  VARIANT (59)..(59): /replace="Ser" or "Ala"
  SITE (1)..(98): /note="Variant residues given in the sequence have no preference with respect to those in the annotations for variant positions"
QVQLVQSGAEVKKPGASVKVSCKASGYTFTQYYMHWVRQAPGQGLEWMGIINPSGGSTQYAQKFQGRVTMTRDTSTSTVYMELSSLRSEDTAVYYCAR

SEQ ID NO: 1431 - protein, 120 aa, Artificial Sequence
  source: /note="Description of Artificial Sequence: Synthetic polypeptide"
  VARIANT (31)..(31): /replace="Gln" or "Ser" or "Ala"
  VARIANT (33)..(33): /replace="Tyr" or "Phe" or "His"
  VARIANT (59)..(59): /replace="Gln" or "Ser" or "Ala"
  SITE (1)..(120): /note="Variant residues given in the sequence have no preference with respect to those in the annotations for variant positions"
QVQLVQSGAEVKKPGASVKVSCKASGYTFTNYWIGWVRQAPGQGLEWMGDIYPGGGYTNYAQKFQGRVTMTRDTSTSTVYMELSSLRSEDTAVYYCARPYYGSSYGFAFWGQGTLVTVSS

SEQ ID NO: 1432 - protein, 120 aa, Artificial Sequence
  source: /note="Description of Artificial Sequence: Synthetic polypeptide"
  VARIANT (31)..(31): /replace="Gln" or "Ser" or "Ala"
  VARIANT (33)..(33): /replace="Tyr" or "Phe" or "His"
  VARIANT (59)..(59): /replace="Gln" or "Ser" or "Ala"
  SITE (1)..(120): /note="Variant residues given in the sequence have no preference with respect to those in the annotations for variant positions"
QVQLVQSGAEVKKPGASVKVSCKASGYTFTNYWIGWVRQAPGQGLEWIGDIYPGGGYTNYAQKFQGRVTMTADTSTSTVYMELSSLRSEDTAVYYCASPYYGSSYGFAFWGQGTLVTVSS

SEQ ID NO: 1433 - protein, 120 aa, Artificial Sequence
  source: /note="Description of Artificial Sequence: Synthetic polypeptide"
  VARIANT (31)..(31): /replace="Gln" or "Ser" or "Ala"
  VARIANT (33)..(33): /replace="Tyr" or "Phe" or "His"
  VARIANT (59)..(59): /replace="Gln" or "Ser" or "Ala"
  SITE (1)..(120): /note="Variant residues given in the sequence have no preference with respect to those in the annotations for variant positions"
QVQLVQSGAEVKKPGASVKMSCKASGYTFTNYWIGWVRQAPGQGLEWIGDIYPGGGYTNYAQKFQGRATLTADTSTSTAYMELSSLRSEDTAVYYCASPYYGSSYGFAFWGQGTLVTVSS

SEQ ID NO: 1434 - protein, 120 aa, Artificial Sequence; identical to SEQ ID NO: 1052
  source: /note="Description of Artificial Sequence: Synthetic polypeptide"

SEQ ID NO: 1435 - protein, 120 aa, Artificial Sequence; identical to SEQ ID NO: 1373
  source: /note="Description of Artificial Sequence: Synthetic polypeptide"

SEQ ID NO: 1436 - protein, 120 aa, Artificial Sequence; identical to SEQ ID NO: 1374
  source: /note="Description of Artificial Sequence: Synthetic polypeptide"

SEQ ID NO: 1437 - protein, 120 aa, Artificial Sequence; identical to SEQ ID NO: 1375
  source: /note="Description of Artificial Sequence: Synthetic polypeptide"

SEQ ID NO: 1438 - protein, 118 aa, Artificial Sequence; identical to SEQ ID NO: 1387
  source: /note="Description of Artificial Sequence: Synthetic polypeptide"

SEQ ID NO: 1439 - protein, 118 aa, Artificial Sequence; identical to SEQ ID NO: 1388
  source: /note="Description of Artificial Sequence: Synthetic polypeptide"

SEQ ID NO: 1440 - protein, 118 aa, Artificial Sequence; identical to SEQ ID NO: 1389
  source: /note="Description of Artificial Sequence: Synthetic polypeptide"

SEQ ID NO: 1441 - protein, 118 aa, Artificial Sequence; identical to SEQ ID NO: 1390
  source: /note="Description of Artificial Sequence: Synthetic polypeptide"

SEQ ID NO: 1442 - protein, 119 aa, Artificial Sequence; identical to SEQ ID NO: 1402
  source: /note="Description of Artificial Sequence: Synthetic polypeptide"

SEQ ID NO: 1443 - protein, 119 aa, Artificial Sequence; identical to SEQ ID NO: 1403
  source: /note="Description of Artificial Sequence: Synthetic polypeptide"

SEQ ID NO: 1444 - protein, 119 aa, Artificial Sequence; identical to SEQ ID NO: 1404
  source: /note="Description of Artificial Sequence: Synthetic polypeptide"

SEQ ID NO: 1445 - protein, 119 aa, Artificial Sequence; identical to SEQ ID NO: 1405
  source: /note="Description of Artificial Sequence: Synthetic polypeptide"

SEQ ID NO: 1446 - protein, 119 aa, Artificial Sequence; identical to SEQ ID NO: 1416
  source: /note="Description of Artificial Sequence: Synthetic polypeptide"

SEQ ID NO: 1447 - protein, 119 aa, Artificial Sequence; identical to SEQ ID NO: 1417
  source: /note="Description of Artificial Sequence: Synthetic polypeptide"

SEQ ID NO: 1448 - protein, 119 aa, Artificial Sequence; identical to SEQ ID NO: 1418
  source: /note="Description of Artificial Sequence: Synthetic polypeptide"

SEQ ID NO: 1449 - protein, 119 aa, Artificial Sequence; identical to SEQ ID NO: 1419
  source: /note="Description of Artificial Sequence: Synthetic polypeptide"

SEQ ID NO: 1450 - protein, 120 aa, Artificial Sequence; identical to SEQ ID NO: 1431
  source: /note="Description of Artificial Sequence: Synthetic polypeptide"

SEQ ID NO: 1451 - protein, 120 aa, Artificial Sequence; identical to SEQ ID NO: 1432
  source: /note="Description of Artificial Sequence: Synthetic polypeptide"

SEQ ID NO: 1452 - protein, 120 aa, Artificial Sequence; identical to SEQ ID NO: 1433
  source: /note="Description of Artificial Sequence: Synthetic polypeptide"

SEQ ID NO: 1453 - protein, 107 aa, Artificial Sequence; identical to SEQ ID NO: 1380
  source: /note="Description of Artificial Sequence: Synthetic polypeptide"

SEQ ID NO: 1454 - protein, 107 aa, Artificial Sequence; identical to SEQ ID NO: 1381
  source: /note="Description of Artificial Sequence: Synthetic polypeptide"

SEQ ID NO: 1455 - protein, 107 aa, Artificial Sequence; identical to SEQ ID NO: 1382
  source: /note="Description of Artificial Sequence: Synthetic polypeptide"

SEQ ID NO: 1456 - protein, 106 aa, Artificial Sequence; identical to SEQ ID NO: 1395
  source: /note="Description of Artificial Sequence: Synthetic polypeptide"

SEQ ID NO: 1457 - protein, 106 aa, Artificial Sequence; identical to SEQ ID NO: 1396
  source: /note="Description of Artificial Sequence: Synthetic polypeptide"

SEQ ID NO: 1458 - protein, 106 aa, Artificial Sequence; identical to SEQ ID NO: 1397
  source: /note="Description of Artificial Sequence: Synthetic polypeptide"

SEQ ID NO: 1459 - protein, 107 aa, Artificial Sequence; identical to SEQ ID NO: 1410
  source: /note="Description of Artificial Sequence: Synthetic polypeptide"

SEQ ID NO: 1460 - protein, 107 aa, Artificial Sequence; identical to SEQ ID NO: 1411
  source: /note="Description of Artificial Sequence: Synthetic polypeptide"

SEQ ID NO: 1461 - protein, 107 aa, Artificial Sequence; identical to SEQ ID NO: 1425
  source: /note="Description of Artificial Sequence: Synthetic polypeptide"

SEQ ID NO: 1462 - protein, 107 aa, Artificial Sequence; identical to SEQ ID NO: 1426
  source: /note="Description of Artificial Sequence: Synthetic polypeptide"

SEQ ID NO: 1463 - protein, 131 aa, Homo sapiens
TPEVWVQVRMEATELSSFTIRCGFLGSGSISLVTVSWGGPNGAGGTTLAVLHPERGIRQWAPARQARWETQSSISLILEGSGASSPCANTTFCCKFASFPEGSWEACGSLPPSSDPGLSAPPTPAPILRAD

SEQ ID NO: 1464 - protein, 151 aa, Homo sapiens
MGHRTLVLPWVLLTLCVTAGTPEVWVQVRMEATELSSFTIRCGFLGSGSISLVTVSWGGPNGAGGTTLAVLHPERGIRQWAPARQARWETQSSISLILEGSGASSPCANTTFCCKFASFPEGSWEACGSLPPSSDPGLSAPPTPAPILRAD

SEQ ID NO: 1465 - protein, 104 aa, Homo sapiens
EVWVQVRMEATELSSFTIRCGFLGSGSISLVTVSWGGPNGAGGTTLAVLHPERGIRQWAPARQARWETQSSISLILEGSGASSPCANTTFCCKFASFPEGSWEA

SEQ ID NO: 1466 - protein, 179 aa, Artificial Sequence
  source: /note="Description of Artificial Sequence: Synthetic polypeptide"
MGHRTLVLPWVLLTLCVTAGTPEVWVQVRMEATELSSFTIRCGFLGSGSISLVTVSWGGPNGAGGTTLAVLHPERGIRQWAPARQARWETQSSISLILEGSGASSPCANTTFCCKFASFPEGSWEACGSLPPSSDPGLSAPPTPAPILRADLAGILGVSGVLLFGCVYLLHLLRRHKHR

SEQ ID NO: 1467 - protein, 191 aa, Artificial Sequence
  source: /note="Description of Artificial Sequence: Synthetic polypeptide"
MGHRTLVLPWVLLTLCVTAGTPEVWVQVRMEATELSSFTIRCGFLGSGSISLVTVSWGGPNGAGGTTLAVLHPERGIRQWAPARQARWETQSSISLILEGSGASSPCANTTFCCKFASFPEGSWEACGSLPPSSDPGLSVPPTPAPILRADLAGILGVSGVLLFDCGYLLHLLCRQKHRPAPRLQPSHTSS

SEQ ID NO: 1468 - protein, 211 aa, Artificial Sequence
  source: /note="Description of Artificial Sequence: Synthetic polypeptide"
MGHRTLVLPWVLLTLCVTAGTPEVWVQVRMEATELSSFTIRWLSAPPTPAPILRADLAGILGVSGVLLFGCVYLLHLLRRHKHRPAPRLQPSRTSPQAPRARAWAPSQASQAALHVPYATINTSCRPATLDTAHPHGGPSWWASLPTHAAHRPQGPAAWASTPIPARGSFVSVENGLYAQAGERPPHTGPGLTLFPDPRGPRAMEGPLGVR

SEQ ID NO: 1469 - protein, 189 aa, Artificial Sequence
  source: /note="Description of Artificial Sequence: Synthetic polypeptide"
MGHRTLVLPWVLLTLCVTAGLSAPPTPAPILRADLAGILGVSGVLLFGCVYLLHLLRRHKHRPAPRLQPSRTSPQAPRARAWAPSQASQAALHVPYATINTSCRPATLDTAHPHGGPSWWASLPTHAAHRPQGPAAWASTPIPARGSFVSVENGLYAQAGERPPHTGPGLTLFPDPRGPRAMEGPLGVR

SEQ ID NO: 1470 - protein, 74 aa, Artificial Sequence
  source: /note="Description of Artificial Sequence: Synthetic polypeptide"
MGHRTLVLPWVLLTLCVTAGLSVPPTPAPILRADLAGILGVSGVLLFDCGYLLHLLCRQKHRPAPRLQPSHTSS

SEQ ID NO: 1471 - protein, 203 aa, Artificial Sequence [sequence omitted]

SEQ ID NO: 1472 - protein, 230 aa, Artificial Sequence
  source: /note="Description of Artificial Sequence: Synthetic polypeptide"
MGHRTLVLPWVLLTLCVTAGTPEVWVQVRMEATELSSFTIRCGFLGSGSISLVTVSWGGPNGAGGTTLAVLHPERGAQISPRGPKIGGPPCPRPGPAGKPRAASLSSWKALGPAAPAPTPPSAASLRPSQAALHVPYATINTSCRPATLDTAHPHGGPSWWASLPTHAAHRPQGPAAWASTPIPARGSFVSVENGLYAQAGERPPHTGPGLTLFPDPRGPRAMEGPLGVR

SEQ ID NO: 1473 - protein, 182 aa, Artificial Sequence
  source: /note="Description of Artificial Sequence: Synthetic polypeptide"
MGHRTLVLPWVLLTLCVTAGTPEVWVQVRMEATELSSFTIRCGFLGSGSISLVTVSWGGPNGAGGTTLAVLHPERGIRQWAPARQARWETQSSISLILEGSGASSPCANTTFCCKFASFPGCSSRPLCHYQHQLPPSYFGHSSPPWGAVLVGVTPHPRCTPAPGPCRLGLHTHPCTWQLCLC

SEQ ID NO: 1474 - protein, 183 aa, Artificial Sequence
  source: /note="Description of Artificial Sequence: Synthetic polypeptide"
TPEVWVQVRMEATELSSFTIRCGFLGSGSISLVTVSWGGPNGAGGTTLAVLHPERGIRQWAPARQARWETQSSISLILEGSGASSPCANTTFCCKFASFPEGSWEACGSLPPSSDPGGAGARGPGGQGGARELATHLILVSVPRALCPADSCPHSAGRPGRDLGGLRSPPLWLCLPPSSAAPT

SEQ ID NO: 1475 - protein, 210 aa, Artificial Sequence
  source: /note="Description of Artificial Sequence: Synthetic polypeptide"
TPEVWVQVRMEATELSSFTIRCGFLGSGSISLVTVSWGGPNGAGGTTLAVLHPERGAQISPRGPKIGGPPCPRPGPAGKPRAASLSSWKALGPAAPAPTPPSAASLRPSQAALHVPYATINTSCRPATLDTAHPHGGPSWWASLPTHAAHRPQGPAAWASTPIPARGSFVSVENGLYAQAGERPPHTGPGLTLFPDPRGPRAMEGPLGVR

SEQ ID NO: 1476 - protein, 162 aa, Artificial Sequence
  source: /note="Description of Artificial Sequence: Synthetic polypeptide"
TPEVWVQVRMEATELSSFTIRCGFLGSGSISLVTVSWGGPNGAGGTTLAVLHPERGIRQWAPARQARWETQSSISLILEGSGASSPCANTTFCCKFASFPGCSSRPLCHYQHQLPPSYFGHSSPPWGAVLVGVTPHPRCTPAPGPCRLGLHTHPCTWQLCLC

SEQ ID NO: 1477 - protein, 66 aa, Artificial Sequence
  source: /note="Description of Artificial Sequence: Synthetic polypeptide"
GAGARGPGGQGGARELATHLILVSVPRALCPADSCPHSAGRPGRDLGGLRSPPLWLCLPPSSAAPT

SEQ ID NO: 1478 - protein, 154 aa, Artificial Sequence
  source: /note="Description of Artificial Sequence: Synthetic polypeptide"
AQISPRGPKIGGPPCPRPGPAGKPRAASLSSWKALGPAAPAPTPPSAASLRPSQAALHVPYATINTSCRPATLDTAHPHGGPSWWASLPTHAAHRPQGPAAWASTPIPARGSFVSVENGLYAQAGERPPHTGPGLTLFPDPRGPRAMEGPLGVR

SEQ ID NO: 1479 - protein, 52 aa, Artificial Sequence
  source: /note="Description of Artificial Sequence: Synthetic polypeptide"
AQISPRGPKIGGPPCPRPGPAGKPRAASLSSWKALGPAAPAPTPPSAASLRP

SEQ ID NO: 1480 - protein, 62 aa, Artificial Sequence
  source: /note="Description of Artificial Sequence: Synthetic polypeptide"
GCSSRPLCHYQHQLPPSYFGHSSPPWGAVLVGVTPHPRCTPAPGPCRLGLHTHPCTWQLCLC

SEQ ID NO: 1481 - protein, 129 aa, Homo sapiens
TPEVWVQVRMEATELSSFTIRCGFLGSGSISLVTVSWGGPNGAGGTTLAVLHPERGIRQWAPARQARWETQSSISLILEGSGASSPCANTTFCCKFASFPEGSWEACGSLPPSSDPGLSAPPTPAPILR

SEQ ID NO: 1482 - protein, 130 aa, Homo sapiens
TPEVWVQVRMEATELSSFTIRCGFLGSGSISLVTVSWGGPNGAGGTTLAVLHPERGIRQWAPARQARWETQSSISLILEGSGASSPCANTTFCCKFASFPEGSWEACGSLPPSSDPGLSAPPTPAPILRA

SEQ ID NO: 1483 - protein, 132 aa, Homo sapiens
TPEVWVQVRMEATELSSFTIRCGFLGSGSISLVTVSWGGPNGAGGTTLAVLHPERGIRQWAPARQARWETQSSISLILEGSGASSPCANTTFCCKFASFPEGSWEACGSLPPSSDPGLSAPPTPAPILRADL

SEQ ID NO: 1484 - protein, 133 aa, Homo sapiens
TPEVWVQVRMEATELSSFTIRCGFLGSGSISLVTVSWGGPNGAGGTTLAVLHPERGIRQWAPARQARWETQSSISLILEGSGASSPCANTTFCCKFASFPEGSWEACGSLPPSSDPGLSAPPTPAPILRADLA

SEQ ID NO: 1485 - protein, 104 aa, Homo sapiens
TPEVWVQVRMEATELSSFTIRCGFLGSGSISLVTVSWGGPNGAGGTTLAVLHPERGIRQWAPARQARWETQSSISLILEGSGASSPCANTTFCCKFASFPEGSW

SEQ ID NO: 1486 - protein, 105 aa, Homo sapiens
TPEVWVQVRMEATELSSFTIRCGFLGSGSISLVTVSWGGPNGAGGTTLAVLHPERGIRQWAPARQARWETQSSISLILEGSGASSPCANTTFCCKFASFPEGSWE

SEQ ID NO: 1487 - protein, 106 aa, Homo sapiens
TPEVWVQVRMEATELSSFTIRCGFLGSGSISLVTVSWGGPNGAGGTTLAVLHPERGIRQWAPARQARWETQSSISLILEGSGASSPCANTTFCCKFASFPEGSWEA

SEQ ID NO: 1488 - protein, 107 aa, Homo sapiens
TPEVWVQVRMEATELSSFTIRCGFLGSGSISLVTVSWGGPNGAGGTTLAVLHPERGIRQWAPARQARWETQSSISLILEGSGASSPCANTTFCCKFASFPEGSWEAC

SEQ ID NO: 1489 - protein, 108 aa, Homo sapiens
TPEVWVQVRMEATELSSFTIRCGFLGSGSISLVTVSWGGPNGAGGTTLAVLHPERGIRQWAPARQARWETQSSISLILEGSGASSPCANTTFCCKFASFPEGSWEACG

SEQ ID NO: 1490 - protein, 103 aa, Homo sapiens
PEVWVQVRMEATELSSFTIRCGFLGSGSISLVTVSWGGPNGAGGTTLAVLHPERGIRQWAPARQARWETQSSISLILEGSGASSPCANTTFCCKFASFPEGSW

SEQ ID NO: 1491 - protein, 104 aa, Homo sapiens
PEVWVQVRMEATELSSFTIRCGFLGSGSISLVTVSWGGPNGAGGTTLAVLHPERGIRQWAPARQARWETQSSISLILEGSGASSPCANTTFCCKFASFPEGSWE

SEQ ID NO: 1492 - protein, 105 aa, Homo sapiens
PEVWVQVRMEATELSSFTIRCGFLGSGSISLVTVSWGGPNGAGGTTLAVLHPERGIRQWAPARQARWETQSSISLILEGSGASSPCANTTFCCKFASFPEGSWEA

SEQ ID NO: 1493 - protein, 106 aa, Homo sapiens
PEVWVQVRMEATELSSFTIRCGFLGSGSISLVTVSWGGPNGAGGTTLAVLHPERGIRQWAPARQARWETQSSISLILEGSGASSPCANTTFCCKFASFPEGSWEAC

SEQ ID NO: 1494 - protein, 107 aa, Homo sapiens
PEVWVQVRMEATELSSFTIRCGFLGSGSISLVTVSWGGPNGAGGTTLAVLHPERGIRQWAPARQARWETQSSISLILEGSGASSPCANTTFCCKFASFPEGSWEACG

SEQ ID NO: 1495 - protein, 102 aa, Homo sapiens
EVWVQVRMEATELSSFTIRCGFLGSGSISLVTVSWGGPNGAGGTTLAVLHPERGIRQWAPARQARWETQSSISLILEGSGASSPCANTTFCCKFASFPEGSW

SEQ ID NO: 1496 - protein, 103 aa, Homo sapiens
EVWVQVRMEATELSSFTIRCGFLGSGSISLVTVSWGGPNGAGGTTLAVLHPERGIRQWAPARQARWETQSSISLILEGSGASSPCANTTFCCKFASFPEGSWE

SEQ ID NO: 1497 - protein, 105 aa, Homo sapiens
EVWVQVRMEATELSSFTIRCGFLGSGSISLVTVSWGGPNGAGGTTLAVLHPERGIRQWAPARQARWETQSSISLILEGSGASSPCANTTFCCKFASFPEGSWEAC

SEQ ID NO: 1498 - protein, 106 aa, Homo sapiens
EVWVQVRMEATELSSFTIRCGFLGSGSISLVTVSWGGPNGAGGTTLAVLHPERGIRQWAPARQARWETQSSISLILEGSGASSPCANTTFCCKFASFPEGSWEACG

SEQ ID NO: 1499 - protein, 101 aa, Homo sapiens
VWVQVRMEATELSSFTIRCGFLGSGSISLVTVSWGGPNGAGGTTLAVLHPERGIRQWAPARQARWETQSSISLILEGSGASSPCANTTFCCKFASFPEGSW

SEQ ID NO: 1500 - protein, 102 aa, Homo sapiens
VWVQVRMEATELSSFTIRCGFLGSGSISLVTVSWGGPNGAGGTTLAVLHPERGIRQWAPARQARWETQSSISLILEGSGASSPCANTTFCCKFASFPEGSWE

SEQ ID NO: 1501 - protein, 103 aa, Homo sapiens
VWVQVRMEATELSSFTIRCGFLGSGSISLVTVSWGGPNGAGGTTLAVLHPERGIRQWAPARQARWETQSSISLILEGSGASSPCANTTFCCKFASFPEGSWEA

SEQ ID NO: 1502 - protein, 104 aa, Homo sapiens
VWVQVRMEATELSSFTIRCGFLGSGSISLVTVSWGGPNGAGGTTLAVLHPERGIRQWAPARQARWETQSSISLILEGSGASSPCANTTFCCKFASFPEGSWEAC

SEQ ID NO: 1503 - protein, 105 aa, Homo sapiens
VWVQVRMEATELSSFTIRCGFLGSGSISLVTVSWGGPNGAGGTTLAVLHPERGIRQWAPARQARWETQSSISLILEGSGASSPCANTTFCCKFASFPEGSWEACG

SEQ ID NO: 1504 - protein, 100 aa, Homo sapiens
WVQVRMEATELSSFTIRCGFLGSGSISLVTVSWGGPNGAGGTTLAVLHPERGIRQWAPARQARWETQSSISLILEGSGASSPCANTTFCCKFASFPEGSW

SEQ ID NO: 1505 - protein, 101 aa, Homo sapiens
WVQVRMEATELSSFTIRCGFLGSGSISLVTVSWGGPNGAGGTTLAVLHPERGIRQWAPARQARWETQSSISLILEGSGASSPCANTTFCCKFASFPEGSWE

SEQ ID NO: 1506 - protein, 102 aa, Homo sapiens
WVQVRMEATELSSFTIRCGFLGSGSISLVTVSWGGPNGAGGTTLAVLHPERGIRQWAPARQARWETQSSISLILEGSGASSPCANTTFCCKFASFPEGSWEA

SEQ ID NO: 1507 - protein, 103 aa, Homo sapiens
WVQVRMEATELSSFTIRCGFLGSGSISLVTVSWGGPNGAGGTTLAVLHPERGIRQWAPARQARWETQSSISLILEGSGASSPCANTTFCCKFASFPEGSWEAC

SEQ ID NO: 1508 - protein, 104 aa, Homo sapiens
WVQVRMEATELSSFTIRCGFLGSGSISLVTVSWGGPNGAGGTTLAVLHPERGIRQWAPARQARWETQSSISLILEGSGASSPCANTTFCCKFASFPEGSWEACG

SEQ ID NO: 1509 - protein, 234 aa, Mus musculus
MRTGNTQAAHATNMGQMQTLVLFSTLLTLCVSEASPEVWVQVQMEATNLSSFSVHCGVLGYSLISLVTVSCEGFVDAGRTKLAVLHPEFGTQQWAPARQAHWETPNSVSVTLTMGQSKARSSLANTTFCCEFVTFPHGSRVACRDLHRSDPGLSAPTPALNLQADLVRILGTSGVFLFGFIFILCLRWQQRHWCLSKSQPSLTSTQAQVETQPPHLASTHSSFISMENGLYALA

SEQ ID NO: 1510 - protein, 221 aa, Mus musculus
MGQMQTLVLFSTLLTLCVSEASPEVWVQVQMEATNLSSFSVHCGVLGYSLISLVTVSCEGFVDAGRTKLAVLHPEFGTQQWAPARQAHWETPNSVSVTLTMGQSKARSSLANTTFCCEFVTFPHGSRVACRDLHRSDPGLSAPTPALNLQADLVRILGTSGVFLFGFIFILCLRWQQRHWCLSKSQPSLTSTQAQVETQPPHLASTHSSFISMENGLYALA

SEQ ID NO: 1511 - protein, 131 aa, Mus musculus
SPEVWVQVQMEATNLSSFSVHCGVLGYSLISLVTVSCEGFVDAGRTKLAVLHPEFGTQQWAPARQAHWETPNSVSVTLTMGQSKARSSLANTTFCCEFVTFPHGSRVACRDLHRSDPGLSAPTPALNLQAD

SEQ ID NO: 1512 - protein, 152 aa, Mus musculus
MGQMQTLVLFSTLLTLCVSEASPEVWVQVQMEATNLSSFSVHCGVLGYSLISLVTVSCEGFVDAGRTKLAVLHPEFGTQQWAPARQAHWETPNSVSVTLTMGQSKARSSLANTTFCCEFVTFPHGSRVACRDLHRSDPGLSAPTPALNLQAD

SEQ ID NO: 1513 - protein, 363 aa, Artificial Sequence
  source: /note="Description of Artificial Sequence: Synthetic polypeptide"
TPEVWVQVRMEATELSSFTIRCGFLGSGSISLVTVSWGGPNGAGGTTLAVLHPERGIRQWAPARQARWETQSSISLILEGSGASSPCANTTFCCKFASFPEGSWEACGSLPPSSDPGLSAPPTPAPILRADEPKSSDKTHTCPPCPAPELLGGPSVFLFPPKPKDTLMISRTPEVTCVVVDVSHEDPEVKFNWYVDGVEVHNAKTKPREEQYNSTYRVVSVLTVLHQDWLNGKEYKCKVSNKALPAPIEKTISKAKGQPREPQVYTLPPSRDELTKNQVSLTCLVKGFYPSDIAVEWESNGQPENNYKTTPPVLDSDGSFFLYSKLTVDKSRWQQGNVFSCSVMHEALHNHYTQKSLSLSPGK

SEQ ID NO: 1514 - protein, 363 aa, Artificial Sequence
  source: /note="Description of Artificial Sequence: Synthetic polypeptide"
TPEVWVQVRMEATELSSFTIRCGFLGSGSISLVTVSWGGPNGAGGTTLAVLHPERGIRQWAPARQARWETQSSISLILEGSGASSPFANTTFCCKFASFPEGSWEASGSLPPSSDPGLSAPPTPAPILRADEPKSSDKTHTCPPCPAPELLGGPSVFLFPPKPKDTLMISRTPEVTCVVVDVSHEDPEVKFNWYVDGVEVHNAKTKPREEQYNSTYRVVSVLTVLHQDWLNGKEYKCKVSNKALPAPIEKTISKAKGQPREPQVYTLPPSRDELTKNQVSLTCLVKGFYPSDIAVEWESNGQPENNYKTTPPVLDSDGSFFLYSKLTVDKSRWQQGNVFSCSVMHEALHNHYTQKSLSLSPGK

SEQ ID NO: 1515 - protein, 363 aa, Artificial Sequence
  source: /note="Description of Artificial Sequence: Synthetic polypeptide"
TPEVWVQVRMEATELSSFTIRCGFLGSGSISLVTVSWGGPNGAGGTTLAVLHPERGIRQWAPARQARWETQSSISLILEGSGASSPCANTTFCCKFASFPEGSWEACGSLPPSSDPGLSAPPTPAPILRADEPKSSDKTHTSPPSPAPELLGGPSVFLFPPKPKDTLMISRTPEVTCVVVDVSHEDPEVKFNWYVDGVEVHNAKTKPREEQYNSTYRVVSVLTVLHQDWLNGKEYKCKVSNKALPAPIEKTISKAKGQPREPQVYTLPPSRDELTKNQVSLTCLVKGFYPSDIAVEWESNGQPENNYKTTPPVLDSDGSFFLYSKLTVDKSRWQQGNVFSCSVMHEALHNHYTQKSLSLSPGK

SEQ ID NO: 1516 - protein, 363 aa, Artificial Sequence
  source: /note="Description of Artificial Sequence: Synthetic polypeptide"
TPEVWVQVRMEATELSSFTIRCGFLGSGSISLVTVSWGGPNGAGGTTLAVLHPERGIRQWAPARQARWETQSSISLILEGSGASSPFANTTFCCKFASFPEGSWEACGSLPPSSDPGLSAPPTPAPILRADEPKSSDKTHTSPPSPAPELLGGPSVFLFPPKPKDTLMISRTPEVTCVVVDVSHEDPEVKFNWYVDGVEVHNAKTKPREEQYNSTYRVVSVLTVLHQDWLNGKEYKCKVSNKALPAPIEKTISKAKGQPREPQVYTLPPSRDELTKNQVSLTCLVKGFYPSDIAVEWESNGQPENNYKTTPPVLDSDGSFFLYSKLTVDKSRWQQGNVFSCSVMHEALHNHYTQKSLSLSPGK

SEQ ID NO: 1517 - protein, 364 aa, Artificial Sequence
  source: /note="Description of Artificial Sequence: Synthetic polypeptide"
SPEVWVQVQMEATNLSSFSVHCGVLGYSLISLVTVSCEGFVDAGRTKLAVLHPEFGTQQWAPARQAHWETPNSVSVTLTMGQSKARSSLANTTFCCEFVTFPHGSRVACRDLHRSDPGLSAPTPALNLQADEPRGPTIKPCPPCKCPAPNLLGGPSVFIFPPKIKDVLMISLSPIVTCVVVDVSEDDPDVQISWFVNNVEVHTAQTQTHREDYNSTLRVVSALPIQHQDWMSGKEFKCKVNNKDLPAPIERTISKPKGSVRAPQVYVLPPPEEEMTKKQVTLTCMVTDFMPEDIYVEWTNNGKTELNYKNTEPVLDSDGSYFMYSKLRVEKKNWVERNSYSCSVVHEGLHNHHTTKSFSRTPGK

SEQ ID NO: 1518 - protein, 364 aa, Artificial Sequence
  source: /note="Description of Artificial Sequence: Synthetic polypeptide"
SPEVWVQVQMEATNLSSFSVHCGVLGYSLISLVTVSCEGFVDAGRTKLAVLHPEFGTQQWAPARQAHWETPNSVSVTLTMGQSKARSSLANTTFCCEFVTFPHGSRVACRDLHRSDPGLSAPTPALNLQADEPRGPTIKPSPPSKSPAPNLLGGPSVFIFPPKIKDVLMISLSPIVTCVVVDVSEDDPDVQISWFVNNVEVHTAQTQTHREDYNSTLRVVSALPIQHQDWMSGKEFKCKVNNKDLPAPIERTISKPKGSVRAPQVYVLPPPEEEMTKKQVTLTCMVTDFMPEDIYVEWTNNGKTELNYKNTEPVLDSDGSYFMYSKLRVEKKNWVERNSYSCSVVHEGLHNHHTTKSFSRTPGK

SEQ ID NO: 1519 - protein, 232 aa, Homo sapiens
EPKSCDKTHTCPPCPAPELLGGPSVFLFPPKPKDTLMISRTPEVTCVVVDVSHEDPEVKFNWYVDGVEVHNAKTKPREEQYNSTYRVVSVLTVLHQDWLNGKEYKCKVSNKALPAPIEKTISKAKGQPREPQVYTLPPSRDELTKNQVSLTCLVKGFYPSDIAVEWESNGQPENNYKTTPPVLDSDGSFFLYSKLTVDKSRWQQGNVFSCSVMHEALHNHYTQKSLSLSPGK

SEQ ID NO: 1520 - protein, 232 aa, Artificial Sequence
  source: /note="Description of Artificial Sequence: Synthetic polypeptide"
EPKSSDKTHTCPPCPAPELLGGPSVFLFPPKPKDTLMISRTPEVTCVVVDVSHEDPEVKFNWYVDGVEVHNAKTKPREEQYNSTYRVVSVLTVLHQDWLNGKEYKCKVSNKALPAPIEKTISKAKGQPREPQVYTLPPSRDELTKNQVSLTCLVKGFYPSDIAVEWESNGQPENNYKTTPPVLDSDGSFFLYSKLTVDKSRWQQGNVFSCSVMHEALHNHYTQKSLSLSPGK

SEQ ID NO: 1521 - protein, 232 aa, Artificial Sequence
  source: /note="Description of Artificial Sequence: Synthetic polypeptide"
EPKSSDKTHTCPPCPAPELLGGPSVFLFPPKPKDTLMISRTPEVTCVVVDVSHEDPEVKFNWYVDGVEVHNAKTKPREEQYASTYRVVSVLTVLHQDWLNGKEYKCKVSNKALPAPIEKTISKAKGQPREPQVYTLPPSRDELTKNQVSLTCLVKGFYPSDIAVEWESNGQPENNYKTTPPVLDSDGSFFLYSKLTVDKSRWQQGNVFSCSVMHEALHNHYTQKSLSLSPGK

SEQ ID NO: 1522 - protein, 217 aa, Artificial Sequence
  source: /note="Description of Artificial Sequence: Synthetic polypeptide"
APELLGGPSVFLFPPKPKDTLMISRTPEVTCVVVDVSHEDPEVKFNWYVDGVEVHNAKTKPREEQYNSTYRVVSVLTVLHQDWLNGKEYKCKVSNKALPAPIEKTISKAKGQPREPQVYTLPPSRDELTKNQVSLTCLVKGFYPSDIAVEWESNGQPENNYKTTPPVLDSDGSFFLYSKLTVDKSRWQQGNVFSCSVMHEALHNHYTQKSLSLSPGK

SEQ ID NO: 1523 - protein, 233 aa, Mus musculus
EPRGPTIKPCPPCKCPAPNLLGGPSVFIFPPKIKDVLMISLSPIVTCVVVDVSEDDPDVQISWFVNNVEVHTAQTQTHREDYNSTLRVVSALPIQHQDWMSGKEFKCKVNNKDLPAPIERTISKPKGSVRAPQVYVLPPPEEEMTKKQVTLTCMVTDFMPEDIYVEWTNNGKTELNYKNTEPVLDSDGSYFMYSKLRVEKKNWVERNSYSCSVVHEGLHNHHTTKSFSRTPGK

SEQ ID NO: 1524 - protein, 233 aa, Artificial Sequence
  source: /note="Description of Artificial Sequence: Synthetic polypeptide"
EPRGPTIKPCPPCKCPAPNLLGGPSVFIFPPKIKDVLMISLSPIVTCVVVDVSEDDPDVQISWFVNNVEVHTAQTQTHREDYASTLRVVSALPIQHQDWMSGKEFKCKVNNKDLPAPIERTISKPKGSVRAPQVYVLPPPEEEMTKKQVTLTCMVTDFMPEDIYVEWTNNGKTELNYKNTEPVLDSDGSYFMYSKLRVEKKNWVERNSYSCSVVHEGLHNHHTTKSFSRTPGK

SEQ ID NO: 1525 - protein, 217 aa, Artificial Sequence
  source: /note="Description of Artificial Sequence: Synthetic polypeptide"
APNLLGGPSVFIFPPKIKDVLMISLSPIVTCVVVDVSEDDPDVQISWFVNNVEVHTAQTQTHREDYNSTLRVVSALPIQHQDWMSGKEFKCKVNNKDLPAPIERTISKPKGSVRAPQVYVLPPPEEEMTKKQVTLTCMVTDFMPEDIYVEWTNNGKTELNYKNTEPVLDSDGSYFMYSKLRVEKKNWVERNSYSCSVVHEGLHNHHTTKSFSRTPGK

SEQ ID NO: 1526 - protein, 232 aa, Artificial Sequence
  source: /note="Description of Artificial Sequence: Synthetic polypeptide"
EPKSSDKTHTSPPSPAPELLGGPSVFLFPPKPKDTLMISRTPEVTCVVVDVSHEDPEVKFNWYVDGVEVHNAKTKPREEQYNSTYRVVSVLTVLHQDWLNGKEYKCKVSNKALPAPIEKTISKAKGQPREPQVYTLPPSRDELTKNQVSLTCLVKGFYPSDIAVEWESNGQPENNYKTTPPVLDSDGSFFLYSKLTVDKSRWQQGNVFSCSVMHEALHNHYTQKSLSLSPGK

SEQ ID NO: 1527 - DNA, 20 bp, Artificial Sequence
  source: /note="Description of Artificial Sequence: Synthetic primer"
ccaccaacctctcgtctttc

SEQ ID NO: 1528 - DNA, 18 bp, Artificial Sequence
  source: /note="Description of Artificial Sequence: Synthetic primer"
tcatgccagagcatacag

SEQ ID NO: 1529 - DNA, 20 bp, Artificial Sequence
  source: /note="Description of Artificial Sequence: Synthetic primer"
cagtgcctctaactgctgac

SEQ ID NO: 1530 - DNA, 22 bp, Artificial Sequence
  source: /note="Description of Artificial Sequence: Synthetic primer"
tcactgttaccagggagatgag

SEQ ID NO: 1531 - DNA, 19 bp, Artificial Sequence
  source: /note="Description of Artificial Sequence: Synthetic primer"
cacaggctgcccatgcaac

SEQ ID NO: 1532 - DNA, 20 bp, Artificial Sequence
  source: /note="Description of Artificial Sequence: Synthetic primer"
tgcctgggtgctagtgagag

SEQ ID NO: 1533 - DNA, 20 bp, Artificial Sequence
  source: /note="Description of Artificial Sequence: Synthetic primer"
ccaccaacctctcgtctttc

SEQ ID NO: 1534 - DNA, 20 bp, Artificial Sequence
  source: /note="Description of Artificial Sequence: Synthetic primer"
gaccctgttacctgtcattg

SEQ ID NO: 1535 - protein, 314 aa, Artificial Sequence
  source: /note="Description of Artificial Sequence: Synthetic polypeptide"
MGHRTLVLPWVLLTLCVTAGTPEVWVQVRMEATELSSFTIRCGFLGSGSISLVTVSWGGPNGAGGTTLAVLHPERGIRQWAPARQARWETQSSISLILEGSGASSPCANTTFCCKFASFPEGSWEACGSLPPSSDPGLSAPPTPAPILRADLAGILGVSGVLLFGCVYLLHLLRRHKHRPAPRLQPSRTSPQAPRARAWAPSQASQAALHVPYATINTSCRPATLDTAHPHGGPSWWASLPTHAAHRPQGPAAWASTPIPARGSFVSVENGLYAQAGERPPHTGPGLTLFPDPRGPRAMEGPLGVRDYKDDDDK

SEQ ID NO: 1536 - protein, 242 aa, Artificial Sequence
  source: /note="Description of Artificial Sequence: Synthetic polypeptide"
MRTGNTQAAHATNMGQMQTLVLFSTLLTLCVSEADYKDDDDKSPEVWVQVQMEATNLSSFSVHCGVLGYSLISLVTVSCEGFVDAGRTKLAVLHPEFGTQQWAPARQAHWETPNSVSVTLTMGQSKARSSLANTTFCCEFVTFPHGSRVACRDLHRSDPGLSAPTPALNLQADLVRILGTSGVFLFGFIFILCLRWQQRHWCLSKSQPSLTSTQAQVETQPPHLASTHSSFISMENGLYALA

SEQ ID NO: 1537 - protein, 218 aa, Artificial Sequence
  source: /note="Description of Artificial Sequence: Synthetic polypeptide"
MQTLVLFSTLLTLCVSEASPEVWVQVQMEATNLSSFSVHCGVLGYSLISLVTVSCEGFVDAGRTKLAVLHPEFGTQQWAPARQAHWETPNSVSVTLTMGQSKARSSLANTTFCCEFVTFPHGSRVACRDLHRSDPGLSAPTPALNLQADLVRILGTSGVFLFGFIFILCLRWQQRHWCLSKSQPSLTSTQAQVETQPPHLASTHSSFISMENGLYALA

SEQ ID NO: 1538 - protein, 226 aa, Artificial Sequence
  source: /note="Description of Artificial Sequence: Synthetic polypeptide"
MQTLVLFSTLLTLCVSEADYKDDDDKSPEVWVQVQMEATNLSSFSVHCGVLGYSLISLVTVSCEGFVDAGRTKLAVLHPEFGTQQWAPARQAHWETPNSVSVTLTMGQSKARSSLANTTFCCEFVTFPHGSRVACRDLHRSDPGLSAPTPALNLQADLVRILGTSGVFLFGFIFILCLRWQQRHWCLSKSQPSLTSTQAQVETQPPHLASTHSSFISMENGLYALA

SEQ ID NO: 1539 - protein, 120 aa, Artificial Sequence; identical to SEQ ID NO: 1052
  source: /note="Description of Artificial Sequence: Synthetic polypeptide"

SEQ ID NO: 1540 - protein, 8 aa, Artificial Sequence
  source: /note="Description of Artificial Sequence: Synthetic peptide"
GYTFTDYN

SEQ ID NO: 1541 - protein, 8 aa, Artificial Sequence
  source: /note="Description of Artificial Sequence: Synthetic peptide"
IYPYIGGS

SEQ ID NO: 1542 - protein, 13 aa, Artificial Sequence
  source: /note="Description of Artificial Sequence: Synthetic peptide"
AREDKTARNAMDY

SEQ ID NO: 1543 - protein, 447 aa, Artificial Sequence
  source: /note="Description of Artificial Sequence: Synthetic polypeptide"
QVQLVQSGAEVKKPGASVKVSCKASGYTFTDYNINWVRQAPGQGLEWMGYIYPYIGGSGYAQKFQGRVTMTRDTSTSTVYMELSSLRSEDTAVYYCAREDKTARNAMDYWGQGTLVTVSSASTKGPSVFPLAPCSRSTSESTAALGCLVKDYFPEPVTVSWNSGALTSGVHTFPAVLQSSGLYSLSSVVTVPSSSLGTKTYTCNVDHKPSNTKVDKRVESKYGPPCPPCPAPEFLGGPSVFLFPPKPKDTLMISRTPEVTCVVVDVSQEDPEVQFNWYVDGVEVHNAKTKPREEQFNSTYRVVSVLTVLHQDWLNGKEYKCKVSNKGLPSSIEKTISKAKGQPREPQVYTLPPSQEEMTKNQVSLTCLVKGFYPSDIAVEWESNGQPENNYKTTPPVLDSDGSFFLYSRLTVDKSRWQEGNVFSCSVMHEALHNHYTQKSLSLSPGK

SEQ ID NO: 1544 - protein, 107 aa, Artificial Sequence; identical to SEQ ID NO: 1380
  source: /note="Description of Artificial Sequence: Synthetic polypeptide"

SEQ ID NO: 1545 - protein, 6 aa, Artificial Sequence
  source: /note="Description of Artificial Sequence: Synthetic peptide"
ENIYSN

SEQ ID NO: 1546 - protein, 3 aa, Artificial Sequence
  source: /note="Description of Artificial Sequence: Synthetic peptide"
EAT

SEQ ID NO: 1547 - protein, 9 aa, Artificial Sequence
  source: /note="Description of Artificial Sequence: Synthetic peptide"
QHFWGTPYT

SEQ ID NO: 1548 - protein, 214 aa, Artificial Sequence
  source: /note="Description of Artificial Sequence: Synthetic polypeptide"
DIQMTQSPSSLSASVGDRVTITCRVSENIYSNLAWYQQKPGKAPKLLIYEATNLAEGVPSRFSGSGSGTDFTLTISSLQPEDFATYYCQHFWGTPYTFGQGTKLEIKRTVAAPSVFIFPPSDEQLKSGTASVVCLLNNFYPREAKVQWKVDNALQSGNSQESVTEQDSKDSTYSLSSTLTLSKADYEKHKVYACEVTHQGLSSPVTKSFNRGEC

SEQ ID NO: 1549 - protein, 119 aa, Artificial Sequence; identical to SEQ ID NO: 1417
  source: /note="Description of Artificial Sequence: Synthetic polypeptide"

SEQ ID NO: 1550 - protein, 8 aa, Artificial Sequence
  source: /note="Description of Artificial Sequence: Synthetic peptide"
GYAFTNYL

SEQ ID NO: 1551 - protein, 8 aa, Artificial Sequence
  source: /note="Description of Artificial Sequence: Synthetic peptide"
INPGSGGI

SEQ ID NO: 1552 - protein, 12 aa, Artificial Sequence
  source: /note="Description of Artificial Sequence: Synthetic peptide"
ARSETHDTWFAY

SEQ ID NO: 1553 - protein, 446 aa, Artificial Sequence
  source: /note="Description of Artificial Sequence: Synthetic polypeptide"
QVQLVQSGAEVKKPGASVKVSCKASGYAFTNYLIEWVRQAPGQGLEWIGVINPGSGGIYYAQKFQGRVTMTADTSTSTVYMELSSLRSEDTAVYYCARSETHDTWFAYWGQGTLVTVSSASTKGPSVFPLAPCSRSTSESTAALGCLVKDYFPEPVTVSWNSGALTSGVHTFPAVLQSSGLYSLSSVVTVPSSSLGTKTYTCNVDHKPSNTKVDKRVESKYGPPCPPCPAPEFLGGPSVFLFPPKPKDTLMISRTPEVTCVVVDVSQEDPEVQFNWYVDGVEVHNAKTKPREEQFNSTYRVVSVLTVLHQDWLNGKEYKCKVSNKGLPSSIEKTISKAKGQPREPQVYTLPPSQEEMTKNQVSLTCLVKGFYPSDIAVEWESNGQPENNYKTTPPVLDSDGSFFLYSRLTVDKSRWQEGNVFSCSVMHEALHNHYTQKSLSLSPGK

SEQ ID NO: 1554 - protein, 107 aa, Artificial Sequence; identical to SEQ ID NO: 1426
  source: /note="Description of Artificial Sequence: Synthetic polypeptide"

SEQ ID NO: 1555 - protein, 6 aa, Artificial Sequence
  source: /note="Description of Artificial Sequence: Synthetic peptide"
QSVRIA

SEQ ID NO: 1556 - protein, 3 aa, Artificial Sequence
  source: /note="Description of Artificial Sequence: Synthetic peptide"
LAS

SEQ ID NO: 1557 - protein, 9 aa, Artificial Sequence
  source: /note="Description of Artificial Sequence: Synthetic peptide"
LQHWNYPYT

SEQ ID NO: 1558 - protein, 214 aa, Artificial Sequence
  source: /note="Description of Artificial Sequence: Synthetic polypeptide"
DIQMTQSPSSLSASVGDRVTITCKASQSVRIAVAWFQQKPGKAPKALIYLASTRHTGVPSRFSGSGSGTDFTLTISSVQPEDFATYYCLQHWNYPYTFGQGTKLEIKRTVAAPSVFIFPPSDEQLKSGTASVVCLLNNFYPREAKVQWKVDNALQSGNSQESVTEQDSKDSTYSLSSTLTLSKADYEKHKVYACEVTHQGLSSPVTKSFNRGEC

SEQ ID NO: 1559 - protein, 98 aa, Artificial Sequence; identical to SEQ ID NO: 1368
  source: /note="Description of Artificial Sequence: Synthetic polypeptide"

SEQ ID NO: 1560 - protein, 15 aa, Artificial Sequence
  source: /note="Description of Artificial Sequence: Synthetic peptide"
YFDYWGQGTLVTVSS

SEQ ID NO: 1561 - protein, 120 aa, Artificial Sequence; identical to SEQ ID NO: 876
  source: /note="Description of Artificial Sequence: Synthetic polypeptide"
  VARIANT (33)..(33): /replace="Gln" or "Ser" or "Ala"
  VARIANT (105)..(105): /replace="Gln" or "Ser" or "Ala"
  SITE (1)..(120): /note="Variant residues given in the sequence have no preference with respect to those in the annotations for variant positions"

SEQ ID NO: 1562 - protein, 98 aa, Artificial Sequence; identical to SEQ ID NO: 1368
  source: /note="Description of Artificial Sequence: Synthetic polypeptide"
  VARIANT (33)..(33): /replace="Gln" or "Ser" or "Ala"
  SITE (1)..(98): /note="Variant residues given in the sequence have no preference with respect to those in the annotations for variant positions"

SEQ ID NO: 1563 - protein, 120 aa, Artificial Sequence; identical to SEQ ID NO: 1052
  source: /note="Description of Artificial Sequence: Synthetic polypeptide"
  VARIANT (33)..(33): /replace="Gln" or "Ser" or "Ala"
  VARIANT (105)..(105): /replace="Gln" or "Ser" or "Ala"
  SITE (1)..(120): /note="Variant residues given in the sequence have no preference with respect to those in the annotations for variant positions"

SEQ ID NO: 1564 - protein, 120 aa, Artificial Sequence; identical to SEQ ID NO: 1373
  source: /note="Description of Artificial Sequence: Synthetic polypeptide"
  VARIANT (33)..(33): /replace="Gln" or "Ser" or "Ala"
  VARIANT (105)..(105): /replace="Gln" or "Ser" or "Ala"
  SITE (1)..(120): /note="Variant residues given in the sequence have no preference with respect to those in the annotations for variant positions"

SEQ ID NO: 1565 - protein, 120 aa, Artificial Sequence; identical to SEQ ID NO: 1374
  source: /note="Description of Artificial Sequence: Synthetic polypeptide"
  VARIANT (33)..(33): /replace="Gln" or "Ser" or "Ala"
  VARIANT (105)..(105): /replace="Gln" or "Ser" or "Ala"
  SITE (1)..(120): /note="Variant residues given in the sequence have no preference with respect to those in the annotations for variant positions"

SEQ ID NO: 1566 - protein, 120 aa, Artificial Sequence; identical to SEQ ID NO: 1375
  source: /note="Description of Artificial Sequence: Synthetic polypeptide"
  VARIANT (33)..(33): /replace="Gln" or "Ser" or "Ala"
  VARIANT (105)..(105): /replace="Gln" or "Ser" or "Ala"
  SITE (1)..(120): /note="Variant residues given in the sequence have no preference with respect to those in the annotations for variant positions"

SEQ ID NO: 1567 - protein, 96 aa, Artificial Sequence; identical to SEQ ID NO: 1376
  source: /note="Description of Artificial Sequence: Synthetic polypeptide"

SEQ ID NO: 1568 - protein, 12 aa, Artificial Sequence
  source: /note="Description of Artificial Sequence: Synthetic peptide"
YTFGQGTKLEIK

SEQ ID NO: 1569 - protein, 107 aa, Artificial Sequence; identical to SEQ ID NO: 880
  source: /note="Description of Artificial Sequence: Synthetic polypeptide"
  VARIANT (28)..(28): /replace="Gln" or "Ser" or "Ala" or "Asp"
  VARIANT (32)..(32): /replace="Gln" or "Ser" or "Ala" or "Asp"
  VARIANT (53)..(53): /replace="Gln" or "Ser" or "Ala" or "Asp"
  VARIANT (92)..(92): /replace="Tyr" or "Phe" or "His"
  SITE (1)..(107): /note="Variant residues given in the sequence have no preference with respect to those in the annotations for variant positions"

SEQ ID NO: 1570 - protein, 96 aa, Artificial Sequence; identical to SEQ ID NO: 1379
  source: /note="Description of Artificial Sequence: Synthetic polypeptide"
  VARIANT (28)..(28): /replace="Ser" or "Ala" or "Asp"
  VARIANT (32)..(32): /replace="Gln" or "Ser" or "Ala" or "Asp"
  VARIANT (53)..(53): /replace="Ser" or "Ala" or "Asp"
  VARIANT (92)..(92): /replace="Phe" or "His"
  SITE (1)..(96): /note="Variant residues given in the sequence have no preference with respect to those in the annotations for variant positions"

SEQ ID NO: 1571 - protein, 107 aa, Artificial Sequence; identical to SEQ ID NO: 1380
  source: /note="Description of Artificial Sequence: Synthetic polypeptide"
  VARIANT (28)..(28): /replace="Gln" or "Ser" or "Ala" or "Asp"
  VARIANT (32)..(32): /replace="Gln" or "Ser" or "Ala" or "Asp"
  VARIANT (53)..(53): /replace="Gln" or "Ser" or "Ala" or "Asp"
  VARIANT (92)..(92): /replace="Tyr" or "Phe" or "His"
  SITE (1)..(107): /note="Variant residues given in the sequence have no preference with respect to those in the annotations for variant positions"

SEQ ID NO: 1572 - protein, 107 aa, Artificial Sequence; identical to SEQ ID NO: 1381
  source: /note="Description of Artificial Sequence: Synthetic polypeptide"
  VARIANT (28)..(28): /replace="Gln" or "Ser" or "Ala" or "Asp"
  VARIANT (32)..(32): /replace="Gln" or "Ser" or "Ala" or "Asp"
  VARIANT (53)..(53): /replace="Gln" or "Ser" or "Ala" or "Asp"
  VARIANT (92)..(92): /replace="Tyr" or "Phe" or "His"
  SITE (1)..(107): /note="Variant residues given in the sequence have no preference with respect to those in the annotations for variant positions"

SEQ ID NO: 1573 - protein, 107 aa, Artificial Sequence; identical to SEQ ID NO: 1382
  source: /note="Description of Artificial Sequence: Synthetic polypeptide"
  VARIANT (28)..(28): /replace="Gln" or "Ser" or "Ala" or "Asp"
  VARIANT (32)..(32): /replace="Gln" or "Ser" or "Ala" or "Asp"
  VARIANT (53)..(53): /replace="Gln" or "Ser" or "Ala" or "Asp"
  VARIANT (92)..(92): /replace="Tyr" or "Phe" or "His"
  SITE (1)..(107): /note="Variant residues given in the sequence have no preference with respect to those in the annotations for variant positions"

SEQ ID NO: 1574 - protein, 98 aa, Artificial Sequence; identical to SEQ ID NO: 1368
  source: /note="Description of Artificial Sequence: Synthetic polypeptide"

SEQ ID NO: 1575 - protein, 15 aa, Artificial Sequence
  source: /note="Description of Artificial Sequence: Synthetic peptide"
YFDYWGQGTLVTVSS

SEQ ID NO: 1576 - protein, 119 aa, Artificial Sequence; identical to SEQ ID NO: 972
  source: /note="Description of Artificial Sequence: Synthetic polypeptide"
  VARIANT (31)..(31): /replace="Gln" or "Ser" or "Ala"
  VARIANT (52)..(52): /replace="Gln" or "Ser" or "Ala"
  VARIANT (105)..(105): /replace="Tyr" or "Phe" or "His"
  SITE (1)..(119): /note="Variant residues given in the sequence have no preference with respect to those in the annotations for variant positions"

SEQ ID NO: 1577 - protein, 98 aa, Artificial Sequence; identical to SEQ ID NO: 1401
  source: /note="Description of Artificial Sequence: Synthetic polypeptide"
  VARIANT (31)..(31): /replace="Ser" or "Ala"
  VARIANT (52)..(52): /replace="Gln" or "Ser" or "Ala"
  SITE (1)..(98): /note="Variant residues given in the sequence have no preference with respect to those in the annotations for variant positions"

SEQ ID NO: 1578 - protein, 119 aa, Artificial Sequence; identical to SEQ ID NO: 1416
  source: /note="Description of Artificial Sequence: Synthetic polypeptide"
  VARIANT (31)..(31): /replace="Gln" or "Ser" or "Ala"
  VARIANT (52)..(52): /replace="Gln" or "Ser" or "Ala"
  VARIANT (105)..(105): /replace="Tyr" or "Phe" or "His"
  SITE (1)..(119): /note="Variant residues given in the sequence have no preference with respect to those in the annotations for variant positions"

SEQ ID NO: 1579 - protein, 119 aa, Artificial Sequence; identical to SEQ ID NO: 1417
  source: /note="Description of Artificial Sequence: Synthetic polypeptide"
  VARIANT (31)..(31): /replace="Gln" or "Ser" or "Ala"
  VARIANT (52)..(52): /replace="Gln" or "Ser" or "Ala"
  VARIANT (105)..(105): /replace="Tyr" or "Phe" or "His"
  SITE (1)..(119): /note="Variant residues given in the sequence have no preference with respect to those in the annotations for variant positions"

SEQ ID NO: 1580 - protein, 119 aa, Artificial Sequence; identical to SEQ ID NO: 1418
  source: /note="Description of Artificial Sequence: Synthetic polypeptide"
  VARIANT (31)..(31): /replace="Gln" or "Ser" or "Ala"
  VARIANT (52)..(52): /replace="Gln" or "Ser" or "Ala"
  VARIANT (105)..(105): /replace="Tyr" or "Phe" or "His"
  SITE (1)..(119): /note="Variant residues given in the sequence have no preference with respect to those in the annotations for variant positions"

SEQ ID NO: 1581 - protein, 119 aa, Artificial Sequence; identical to SEQ ID NO: 1419
  source: /note="Description of Artificial Sequence: Synthetic polypeptide"
  VARIANT (31)..(31): /replace="Gln" or "Ser" or "Ala"
  VARIANT (52)..(52): /replace="Gln" or "Ser" or "Ala"
  VARIANT (105)..(105): /replace="Tyr" or "Phe" or "His"
  SITE (1)..(119): /note="Variant residues given in the sequence have no preference with respect to those in the annotations for variant positions"

SEQ ID NO: 1582 - protein, 96 aa, Artificial Sequence; identical to SEQ ID NO: 1376
  source: /note="Description of Artificial Sequence: Synthetic polypeptide"

SEQ ID NO: 1583 - protein, 12 aa, Artificial Sequence
  source: /note="Description of Artificial Sequence: Synthetic peptide"
YTFGQGTKLEIK

SEQ ID NO: 1584 - protein, 96 aa, Artificial Sequence; identical to SEQ ID NO: 1422
  source: /note="Description of Artificial Sequence: Synthetic polypeptide"

SEQ ID NO: 1585 - protein, 107 aa, Artificial Sequence; identical to SEQ ID NO: 1423
  source: /note="Description of Artificial Sequence: Synthetic polypeptide"
  VARIANT (92)..(92): /replace="Tyr" or "Phe" or "His"
  VARIANT (93)..(93): /replace="Gln" or "Ser" or "Ala" or "Asp"
  SITE (1)..(107): /note="Variant residues given in the sequence have no preference with respect to those in the annotations for variant positions"

SEQ ID NO: 1586 - protein, 96 aa, Artificial Sequence; identical to SEQ ID NO: 1424
  source: /note="Description of Artificial Sequence: Synthetic polypeptide"
  VARIANT (92)..(92): /replace="Phe" or "His"
  VARIANT (93)..(93): /replace="Ser" or "Ala" or "Asp"
  SITE (1)..(96): /note="Variant residues given in the sequence have no preference with respect to those in the annotations for variant positions"

SEQ ID NO: 1587 - protein, 107 aa, Artificial Sequence; identical to SEQ ID NO: 1425
  source: /note="Description of Artificial Sequence: Synthetic polypeptide"
  VARIANT (92)..(92): /replace="Tyr" or "Phe" or "His"
  VARIANT (93)..(93): /replace="Gln" or "Ser" or "Ala" or "Asp"
  SITE (1)..(107): /note="Variant residues given in the sequence have no preference with respect to those in the annotations for variant positions"

SEQ ID NO: 1588 - protein, 107 aa, Artificial Sequence; identical to SEQ ID NO: 1426
  source: /note="Description of Artificial Sequence: Synthetic polypeptide"
  VARIANT (92)..(92): /replace="Tyr" or "Phe" or "His"
  VARIANT (93)..(93): /replace="Gln" or "Ser" or "Ala" or "Asp"
  SITE (1)..(107): /note="Variant residues given in the sequence have no preference with respect to those in the annotations for variant positions"

SEQ ID NO: 1589 - protein, 98 aa, Artificial Sequence; identical to SEQ ID NO: 1368
  source: /note="Description of Artificial Sequence: Synthetic polypeptide"

SEQ ID NO: 1590 - protein, 15 aa, Artificial Sequence
  source: /note="Description of Artificial Sequence: Synthetic peptide"
YFDYWGQGTLVTVSS

SEQ ID NO: 1591 - protein, 120 aa, Artificial Sequence; identical to SEQ ID NO: 980
  source: /note="Description of Artificial Sequence: Synthetic polypeptide"
  VARIANT (31)..(31): /replace="Gln" or "Ser" or "Ala"
  VARIANT (33)..(33): /replace="Tyr" or "Phe" or "His"
  VARIANT (59)..(59): /replace="Gln" or "Ser" or "Ala"
  SITE (1)..(120): /note="Variant residues given in the sequence have no preference with respect to those in the annotations for variant positions"

SEQ ID NO: 1592 - protein, 98 aa, Artificial Sequence; identical to SEQ ID NO: 1430
  source: /note="Description of Artificial Sequence: Synthetic polypeptide"
  VARIANT (31)..(31): /replace="Ser" or "Ala"
  VARIANT (33)..(33): /replace="Phe" or "His"
  VARIANT (59)..(59): /replace="Ser" or "Ala"
  SITE (1)..(98): /note="Variant residues given in the sequence have no preference with respect to those in the annotations for variant positions"

SEQ ID NO: 1593 - protein, 120 aa, Artificial Sequence; identical to SEQ ID NO: 1431
  source: /note="Description of Artificial Sequence: Synthetic polypeptide"
  VARIANT (31)..(31): /replace="Gln" or "Ser" or "Ala"
  VARIANT (33)..(33): /replace="Tyr" or "Phe" or "His"
  VARIANT (59)..(59): /replace="Gln" or "Ser" or "Ala"
  SITE (1)..(120): /note="Variant residues given in the sequence have no preference with respect to those in the annotations for variant positions"

SEQ ID NO: 1594 - protein, 120 aa, Artificial Sequence; identical to SEQ ID NO: 1432
  source: /note="Description of Artificial Sequence: Synthetic polypeptide"
  VARIANT (31)..(31): /replace="Gln" or "Ser" or "Ala"
  VARIANT (33)..(33): /replace="Tyr" or "Phe" or "His"
  VARIANT (59)..(59): /replace="Gln" or "Ser" or "Ala"
  SITE (1)..(120): /note="Variant residues given in the sequence have no preference with respect to those in the annotations for variant positions"

SEQ ID NO: 1595 - protein, 120 aa, Artificial Sequence; identical to SEQ ID NO: 1433
  source: /note="Description of Artificial Sequence: Synthetic polypeptide"
  VARIANT (31)..(31): /replace="Gln" or "Ser" or "Ala"
  VARIANT (33)..(33): /replace="Tyr" or "Phe" or "His"
  VARIANT (59)..(59): /replace="Gln" or "Ser" or "Ala"
  SITE (1)..(120): /note="Variant residues given in the sequence have no preference with respect to those in the annotations for variant positions"

SEQ ID NO: 1596 - protein, 120 aa, Artificial Sequence; identical to SEQ ID NO: 1052
  source: /note="Description of Artificial Sequence: Synthetic polypeptide"

SEQ ID NO: 1597 - protein, 120 aa, Artificial Sequence; identical to SEQ ID NO: 1373
  source: /note="Description of Artificial Sequence: Synthetic polypeptide"

SEQ ID NO: 1598 - protein, 120 aa, Artificial Sequence; identical to SEQ ID NO: 1374
  source: /note="Description of Artificial Sequence: Synthetic polypeptide"

SEQ ID NO: 1599 - protein, 120 aa, Artificial Sequence; identical to SEQ ID NO: 1375
  source: /note="Description of Artificial Sequence: Synthetic polypeptide"

SEQ ID NO: 1600 - protein, 107 aa, Artificial Sequence; identical to SEQ ID NO: 1380
  source: /note="Description of Artificial Sequence: Synthetic polypeptide"

SEQ ID NO: 1601 - protein, 107 aa, Artificial Sequence; identical to SEQ ID NO: 1381
  source: /note="Description of Artificial Sequence: Synthetic polypeptide"

SEQ ID NO: 1602 - protein, 107 aa, Artificial Sequence; identical to SEQ ID NO: 1382
  source: /note="Description of Artificial Sequence: Synthetic polypeptide"

SEQ ID NO: 1603 - protein, 119 aa, Artificial Sequence; identical to SEQ ID NO: 1416
  source: /note="Description of Artificial Sequence: Synthetic polypeptide"

SEQ ID NO: 1604 - protein, 119 aa, Artificial Sequence; identical to SEQ ID NO: 1417
  source: /note="Description of Artificial Sequence: Synthetic polypeptide"

SEQ ID NO: 1605 - protein, 119 aa, Artificial Sequence; identical to SEQ ID NO: 1418
  source: /note="Description of Artificial Sequence: Synthetic polypeptide"

SEQ ID NO: 1606 - protein, 119 aa, Artificial Sequence; identical to SEQ ID NO: 1419
  source: /note="Description of Artificial Sequence: Synthetic polypeptide"

SEQ ID NO: 1607 - protein, 107 aa, Artificial Sequence; identical to SEQ ID NO: 1425
  source: /note="Description of Artificial Sequence: Synthetic polypeptide"

SEQ ID NO: 1608 - protein, 107 aa, Artificial Sequence; identical to SEQ ID NO: 1426
  source: /note="Description of Artificial Sequence: Synthetic polypeptide"

SEQ ID NO: 1609 - protein, 120 aa, Artificial Sequence; identical to SEQ ID NO: 1431
  source: /note="Description of Artificial Sequence: Synthetic polypeptide"

SEQ ID NO: 1610 - protein, 120 aa, Artificial Sequence; identical to SEQ ID NO: 1432
  source: /note="Description of Artificial Sequence: Synthetic polypeptide"

SEQ ID NO: 1611 - protein, 120 aa, Artificial Sequence; identical to SEQ ID NO: 1433
  source: /note="Description of Artificial Sequence: Synthetic polypeptide"

SEQ ID NO: 1612 - protein, 107 aa, Artificial Sequence; identical to SEQ ID NO: 1425
  source: /note="Description of Artificial Sequence: Synthetic polypeptide"

SEQ ID NO: 1613 - protein, 107 aa, Artificial Sequence; identical to SEQ ID NO: 1426
  source: /note="Description of Artificial Sequence: Synthetic polypeptide"

SEQ ID NO: 1614 - protein, 131 aa, Homo sapiens; identical to SEQ ID NO: 1463

SEQ ID NO: 1615 - protein, 131 aa, Macaca fascicularis
TPEVWVQVQMEATELSSFTVHCGFLGPGSISLVTVSWGGPDGAGGTKLAVLHPELGTRQWAPARQARWETQSSISLALEDSGASSPFANTTFCCKFASFPEGSWESCGSLPPSSDPGLSAPPTPVPILRAD

SEQ ID NO: 1616 - protein, 126 aa, Callithrix jacchus
TPEVWVQVQMKATELSSFIVHCGFLGSGSISLVTVSWGGPDGAGGTRLAVLHPELGTRQWAPAHQARWETQSSISLVLEEPGASSPSANTTFCCKFASFPEGSWEACGSLPPSSDPGLSAPILRAD

SEQ ID NO: 1617 - protein, 131 aa, Macaca mulatta; identical to SEQ ID NO: 1615

SEQ ID NO: 1618 - protein, 166 aa, Artificial Sequence
  source: /note="Description of Artificial Sequence: Synthetic polypeptide"
MEWNWVFLFLLSVTAGVHSQVQLQQSGAELAKPGSSVMISCKASGYTFTNYAVHWIKQTTGQALEWTGYIAPGSGVTKYNEKFKGKATLTVDKSSTTAYMQLSSLTPVDTAVYYCASGTTRFAYWGQGTLVTVSSAQTTAPSVYPLAPGCGDTTSSTVTLGCLVKG

SEQ ID NO: 1619 - protein, 498 aa, Artificial Sequence
  source: /note="Description of Artificial Sequence: Synthetic polypeptide"
ATGGAATGGAACTGGGTCTTTCTCTTCCTCCTGTCAGTAACTGCAGGAGTCCACTCCCAGGTCCAGCTGCAGCAGTCTGGAGCTGAGCTGGCAAAGCCTGGCTCTTCAGTGATGATTTCCTGCAAGGCTTCTGGTTACACCTTTACCAACTATGCTGTGCACTGGATAAAGCAGACGACTGGACAGGCCCTTGAGTGGACTGGATATATTGCTCCTGGAAGTGGAGTTACTAAATACAATGAGAAGTTCAAGGGCAAGGCCACATTGACTGTAGACAAATCCTCAACCACAGCCTACATGCAACTCAGCAGCCTGACACCTGTGGACACTGCGGTCTATTACTGTGCAAGCGGAACTACGAGGTTTGCTTATTGGGGCCAAGGCACTCTGGTCACTGTCTCTTCAGCCCAAACAACAGCCCCATCTGTCTATCCACTGGCTCCTGGATGTGGTGATACAACCAGCTCCACGGTGACTCTGGGATGCCTGGTCAAGGGC

SEQ ID NO: 1620 - protein, 130 aa, Artificial Sequence
  source: /note="Description of Artificial Sequence: Synthetic polypeptide"
METDTLLLWVLLLWVPGSTGDIVLTQSPALAVSLGQRATISCRASQSVSLSSYNLMQWYQQKPGQEPKILIYDASNLPSGIPARFSGSGSGTDFTLTIDPVQADDIATYYCQQSKDDPLTFGSGTKLEIK

SEQ ID NO: 1621 - protein, 390 aa, Artificial Sequence
  source: /note="Description of Artificial Sequence: Synthetic polypeptide"
ATGGAGACAGACACACTCCTGCTATGGGTGCTGCTGCTCTGGGTTCCAGGCTCCACTGGTGACATTGTGCTGACCCAGTCTCCTGCTTTGGCTGTGTCTCTAGGGCAGAGGGCCACAATCTCCTGTAGAGCCAGCCAAAGTGTCAGTTTATCCAGCTATAATCTCATGCAGTGGTACCAACAGAAACCAGGACAGGAACCCAAAATCCTCATCTATGATGCATCCAACCTACCATCTGGGATCCCTGCCAGGTTCAGTGGCAGTGGGTCTGGGACAGACTTCACCCTCACCATTGATCCTGTGCAGGCTGATGATATTGCAACCTATTACTGTCAGCAGAGTAAGGATGACCCGCTCACGTTCGGTTCTGGGACCAAGCTGGAGATCAAA

SEQ ID NO: 1622 - protein, 330 aa, Artificial Sequence
  source: /note="Description of Artificial Sequence: Synthetic polypeptide"
ASTKGPSVFPLAPSSKSTSGGTAALGCLVKDYFPEPVTVSWNSGALTSGVHTFPAVLQSSGLYSLSSVVTVPSSSLGTQTYICNVNHKPSNTKVDKKVEPKSCDKTHTCPPCPAPELLGGPSVFLFPPKPKDTLMISRTPEVTCVVVDVSHEDPEVKFNWYVDGVEVHNAKTKPREEQYNSTYRVVSVLTVLHQDWLNGKEYKCKVSNKALPAPIEKTISKAKGQPREPQVYTLPPSREEMTKNQVSLTCLVKGFYPSDIAVEWESNGQPENNYKTTPPVLDSDGSFFLYSKLTVDKSRWQQGNVFSCSVMHEALHNHYTQKSLSLSPGK

SEQ ID NO: 1623 - protein, 330 aa, Artificial Sequence
  source: /note="Description of Artificial Sequence: Synthetic polypeptide"
ASTKGPSVFPLAPSSKSTSGGTAALGCLVKDYFPEPVTVSWNSGALTSGVHTFPAVLQSSGLYSLSSVVTVPSSSLGTQTYICNVNHKPSNTKVDKKVEPKSCDKTHTCPPCPAPELLGGPSVFLFPPKPKDTLMISRTPEVTCVVVAVSHEDPEVKFNWYVDGVEVHNAKTKPREEQYNSTYRVVSVLTVLHQDWLNGKEYKCKVSNKALPAPIEKTISKAKGQPREPQVYTLPPSREEMTKNQVSLTCLVKGFYPSDIAVEWESNGQPENNYKTTPPVLDSDGSFFLYSKLTVDKSRWQQGNVFSCSVMHEALHNHYTQKSLSLSPGK

SEQ ID NO: 1624 - protein, 330 aa, Artificial Sequence
  source: /note="Description of Artificial Sequence: Synthetic polypeptide"
ASTKGPSVFPLAPSSKSTSGGTAALGCLVKDYFPEPVTVSWNSGALTSGVHTFPAVLQSSGLYSLSSVVTVPSSSLGTQTYICNVNHKPSNTKVDKKVEPKSCDKTHTCPPCPAPELLGGPSVFLFPPKPKDTLMISRTPEVTCVVVDVSHEDPEVKFNWYVDGVEVHNAKTKPREEQYASTYRVVSVLTVLHQDWLNGKEYKCKVSNKALPAPIEKTISKAKGQPREPQVYTLPPSREEMTKNQVSLTCLVKGFYPSDIAVEWESNGQPENNYKTTPPVLDSDGSFFLYSKLTVDKSRWQQGNVFSCSVMHEALHNHYTQKSLSLSPGK

SEQ ID NO: 1625 - protein, 326 aa, Artificial Sequence; identical to SEQ ID NO: 1355
  source: /note="Description of Artificial Sequence: Synthetic polypeptide"

SEQ ID NO: 1626 - protein, 377 aa, Artificial Sequence; identical to SEQ ID NO: 1356
  source: /note="Description of Artificial Sequence: Synthetic polypeptide"

SEQ ID NO: 1627 - protein, 327 aa, Artificial Sequence
  source: /note="Description of Artificial Sequence: Synthetic polypeptide"
ASTKGPSVFPLAPCSRSTSESTAALGCLVKDYFPEPVTVSWNSGALTSGVHTFPAVLQSSGLYSLSSVVTVPSSSLGTKTYTCNVDHKPSNTKVDKRVESKYGPPCPSCPAPEFLGGPSVFLFPPKPKDTLMISRTPEVTCVVVDVSQEDPEVQFNWYVDGVEVHNAKTKPREEQFNSTYRVVSVLTVLHQDWLNGKEYKCKVSNKGLPSSIEKTISKAKGQPREPQVYTLPPSQEEMTKNQVSLTCLVKGFYPSDIAVEWESNGQPENNYKTTPPVLDSDGSFFLYSRLTVDKSRWQEGNVFSCSVMHEALHNHYTQKSLSLSPGK

SEQ ID NO: 1628 - protein, 327 aa, Artificial Sequence
  source: /note="Description of Artificial Sequence: Synthetic polypeptide"
ASTKGPSVFPLAPCSRSTSESTAALGCLVKDYFPEPVTVSWNSGALTSGVHTFPAVLQSSGLYSLSSVVTVPSSSLGTKTYTCNVDHKPSNTKVDKRVESKYGPPCPPCPAPEFLGGPSVFLFPPKPKDTLMISRTPEVTCVVVDVSQEDPEVQFNWYVDGVEVHNAKTKPREEQFNSTYRVVSVLTVLHQDWLNGKEYKCKVSNKGLPSSIEKTISKAKGQPREPQVYTLPPSQEEMTKNQVSLTCLVKGFYPSDIAVEWESNGQPENNYKTTPPVLDSDGSFFLYSRLTVDKSRWQEGNVFSCSVMHEALHNHYTQKSLSLSPGK

SEQ ID NO: 1629 - protein, 107 aa, Artificial Sequence [sequence omitted]

SEQ ID NO: 1630 - protein, 106 aa, Artificial Sequence
  source: /note="Description of Artificial Sequence: Synthetic polypeptide"
GQPKAAPSVTLFPPSSEELQANKATLVCLISDFYPGAVTVAWKADSSPVKAGVETTTPSKQSNNKYAASSYLSLTPEQWKSHRSYSCQVTHEGSTVEKTVAPTECS

SEQ ID NO: 1631 - protein, 120 aa, Artificial Sequence
  source: /note="Description of Artificial Sequence: Synthetic polypeptide"
MMTGTIETTGNISAEKGGSIILQCHLSSTTAQVTQVNWEQQDQLLAICNADLGWHISPSFKDRVAPGPGLGLTLQSLTVNDTGEYFCIYHTYPDGTYTGRIFLEVLESSVAEHGARFQIP

SEQ ID NO: 1632 - protein, 121 aa, Artificial Sequence
  source: /note="Description of Artificial Sequence: Synthetic polypeptide"
MMTGTIETTGNISAKKGGSVILQCHLSSTMAQVTQVNWEQHDHSLLAIRNAELGWHIYPAFKDRVAPGPGLGLTLQSLTMNDTGEYFCTYHTYPDGTYRGRIFLEVLESSVAEHSARFQIP

SEQ ID NO: 1633 - protein, 316 aa, Artificial Sequence
  source: /note="Description of Artificial Sequence: Synthetic polypeptide"
DVVVQAPTQVPGFLGDSVTLPCYLQVPNMEVTHVSQLTWARHGESGSMAVFHQTQGPSYSESKRLEFVAARLGAELRNASLRMFGLRVEDEGNYTCLFVTFPQGSRSVDIWLRVLAKPQNTAEVQKVQLTGEPVPMARCVSTGGRPPAQITWHSDLGGMPNTSQVPGFLSGTVTVTSLWILVPSSQVDGKNVTCKVEHESFEKPQLLTVNLTVYYPPEVSISGYDNNWYLGQNEATLTCDARSNPEPTGYNWSTTMGPLPPFAVAQGAQLLIRPVDKPINTTLICNVTNALGARQAELTVQVKEGPPSEHSGMSRN

SEQ ID NO: 1634 - protein, 121 aa, Artificial Sequence
  source: /note="Description of Artificial Sequence: Synthetic polypeptide"
EVQLVETGGGLIQPGRSLRLSCAASGFTFSSYAMHWVRQAPGKGLEWVAVISYAGEVKYYADSVKGRFTISRDNSKNTLYLQMNSLRAEDTAVYYCARDPLPLHYYGMDVWGQGTTVTVSS

SEQ ID NO: 1635 - protein, 8 aa, Artificial Sequence
  source: /note="Description of Artificial Sequence: Synthetic peptide"
GFTFSSYA

SEQ ID NO: 1636 - protein, 8 aa, Artificial Sequence
  source: /note="Description of Artificial Sequence: Synthetic peptide"
ISYAGEVK

SEQ ID NO: 1637 - protein, 14 aa, Artificial Sequence
  source: /note="Description of Artificial Sequence: Synthetic peptide"
ARDPLPLHYYGMDV

SEQ ID NO: 1638 - protein, 448 aa, Artificial Sequence
  source: /note="Description of Artificial Sequence: Synthetic polypeptide"
EVQLVETGGGLIQPGRSLRLSCAASGFTFSSYAMHWVRQAPGKGLEWVAVISYAGEVKYYADSVKGRFTISRDNSKNTLYLQMNSLRAEDTAVYYCARDPLPLHYYGMDVWGQGTTVTVSSASTKGPSVFPLAPCSRSTSESTAALGCLVKDYFPEPVTVSWNSGALTSGVHTFPAVLQSSGLYSLSSVVTVPSSSLGTKTYTCNVDHKPSNTKVDKRVESKYGPPCPPCPAPEFLGGPSVFLFPPKPKDTLMISRTPEVTCVVVDVSQEDPEVQFNWYVDGVEVHNAKTKPREEQFNSTYRVVSVLTVLHQDWLNGKEYKCKVSNKGLPSSIEKTISKAKGQPREPQVYTLPPSQEEMTKNQVSLTCLVKGFYPSDIAVEWESNGQPENNYKTTPPVLDSDGSFFLYSRLTVDKSRWQEGNVFSCSVMHEALHNHYTQKSLSLSPGK

SEQ ID NO: 1639 - protein, 110 aa, Artificial Sequence
  source: /note="Description of Artificial Sequence: Synthetic polypeptide"
QSALTQPRSASGNPGQRVTISCSGSSSNMGRRPVNWYQQIPGTAPKLLIYSQNQRPSGVPDRFSGSQSGTSASLTISGLQSEDEAEYFCAVWDDIGRVLQLGGGTQLAVL

SEQ ID NO: 1640 - protein, 8 aa, Artificial Sequence
  source: /note="Description of Artificial Sequence: Synthetic peptide"
SSNMGRRP

SEQ ID NO: 1641 - protein, 3 aa, Artificial Sequence
  source: /note="Description of Artificial Sequence: Synthetic peptide"
SQN

SEQ ID NO: 1642 - protein, 11 aa, Artificial Sequence
  source: /note="Description of Artificial Sequence: Synthetic peptide"
AVWDDIGRVLQ

SEQ ID NO: 1643 - protein, 216 aa, Artificial Sequence
  source: /note="Description of Artificial Sequence: Synthetic polypeptide"
QSALTQPRSASGNPGQRVTISCSGSSSNMGRRPVNWYQQIPGTAPKLLIYSQNQRPSGVPDRFSGSQSGTSASLTISGLQSEDEAEYFCAVWDDIGRVLQLGGGTQLAVLGQPKAAPSVTLFPPSSEELQANKATLVCLISDFYPGAVTVAWKADSSPVKAGVETTTPSKQSNNKYAASSYLSLTPEQWKSHRSYSCQVTHEGSTVEKTVAPTECS

SEQ ID NO: 1644 - protein, 121 aa, Artificial Sequence
  source: /note="Description of Artificial Sequence: Synthetic polypeptide"
EVQLVETGGGLIQPGRSLRLSCAASGFTFSSYAMHWVRQAPGKGLEWVAVISYDGTPVYYADSVKGRFTISRDNSKNTLYLQMNSLRAEDTAVYYCARDPLPLHYYGMDVWGQGTTVTVSS

SEQ ID NO: 1645 - protein, 8 aa, Artificial Sequence
  source: /note="Description of Artificial Sequence: Synthetic peptide"
GFTFSSYA

SEQ ID NO: 1646 - protein, 8 aa, Artificial Sequence
  source: /note="Description of Artificial Sequence: Synthetic peptide"
ISYDGTPV

SEQ ID NO: 1647 - protein, 14 aa, Artificial Sequence
  source: /note="Description of Artificial Sequence: Synthetic peptide"
ARDPLPLHYYGMDV

SEQ ID NO: 1648 - protein, 448 aa, Artificial Sequence
  source: /note="Description of Artificial Sequence: Synthetic polypeptide"
EVQLVETGGGLIQPGRSLRLSCAASGFTFSSYAMHWVRQAPGKGLEWVAVISYDGTPVYYADSVKGRFTISRDNSKNTLYLQMNSLRAEDTAVYYCARDPLPLHYYGMDVWGQGTTVTVSSASTKGPSVFPLAPCSRSTSESTAALGCLVKDYFPEPVTVSWNSGALTSGVHTFPAVLQSSGLYSLSSVVTVPSSSLGTKTYTCNVDHKPSNTKVDKRVESKYGPPCPPCPAPEFLGGPSVFLFPPKPKDTLMISRTPEVTCVVVDVSQEDPEVQFNWYVDGVEVHNAKTKPREEQFNSTYRVVSVLTVLHQDWLNGKEYKCKVSNKGLPSSIEKTISKAKGQPREPQVYTLPPSQEEMTKNQVSLTCLVKGFYPSDIAVEWESNGQPENNYKTTPPVLDSDGSFFLYSRLTVDKSRWQEGNVFSCSVMHEALHNHYTQKSLSLSPGK

SEQ ID NO: 1649 - protein, 111 aa, Artificial Sequence
  source: /note="Description of Artificial Sequence: Synthetic polypeptide"
QSALTQPRSASGNPGQRVTISCSGSSSNMGRRPVNWYQQIPGTAPKLLIYSQNQRPSGVPDRFSGSQSGTSASLTISGLQSEDEAEYFCAVWDGDRRSLQLGGGTQLAVLG

SEQ ID NO: 1650 - protein, 8 aa, Artificial Sequence
  source: /note="Description of Artificial Sequence: Synthetic peptide"
SSNMGRRP

SEQ ID NO: 1651 - protein, 3 aa, Artificial Sequence
  source: /note="Description of Artificial Sequence: Synthetic peptide"
SQN

SEQ ID NO: 1652 - protein, 11 aa, Artificial Sequence
  source: /note="Description of Artificial Sequence: Synthetic peptide"
AVWDGDRRSLQ

SEQ ID NO: 1653 - protein, 216 aa, Artificial Sequence
  source: /note="Description of Artificial Sequence: Synthetic polypeptide"
QSALTQPRSASGNPGQRVTISCSGSSSNMGRRPVNWYQQIPGTAPKLLIYSQNQRPSGVPDRFSGSQSGTSASLTISGLQSEDEAEYFCAVWDGDRRSLQLGGGTQLAVLGQPKAAPSVTLFPPSSEELQANKATLVCLISDFYPGAVTVAWKADSSPVKAGVETTTPSKQSNNKYAASSYLSLTPEQWKSHRSYSCQVTHEGSTVEKTVAPTECS

SEQ ID NO: 1654 - protein, 119 aa, Artificial Sequence
  source: /note="Description of Artificial Sequence: Synthetic polypeptide"
EVQLVESGGGLVQPGGSLRLSCAASGFTFSSYIMSWVRQAPGKGLEWVATISGGGTNTYYADSVKGRFTISRDNSKNTLYLQMNSLRAEDTAVYYCAKWLLSYYAMDYWGQGTLVTVSS

SEQ ID NO: 1655 - protein, 10 aa, Artificial Sequence
  source: /note="Description of Artificial Sequence: Synthetic peptide"
GFTFSSYIMS

SEQ ID NO: 1656 - protein, 10 aa, Artificial Sequence
  source: /note="Description of Artificial Sequence: Synthetic peptide"
TISGGGTNTY

SEQ ID NO: 1657 - protein, 10 aa, Artificial Sequence
  source: /note="Description of Artificial Sequence: Synthetic peptide"
WLLSYYAMDY

SEQ ID NO: 1658 - protein, 446 aa, Artificial Sequence
  source: /note="Description of Artificial Sequence: Synthetic polypeptide"
EVQLVESGGGLVQPGGSLRLSCAASGFTFSSYIMSWVRQAPGKGLEWVATISGGGTNTYYADSVKGRFTISRDNSKNTLYLQMNSLRAEDTAVYYCAKWLLSYYAMDYWGQGTLVTVSSASTKGPSVFPLAPCSRSTSESTAALGCLVKDYFPEPVTVSWNSGALTSGVHTFPAVLQSSGLYSLSSVVTVPSSSLGTKTYTCNVDHKPSNTKVDKRVESKYGPPCPPCPAPEFLGGPSVFLFPPKPKDTLMISRTPEVTCVVVDVSQEDPEVQFNWYVDGVEVHNAKTKPREEQFNSTYRVVSVLTVLHQDWLNGKEYKCKVSNKGLPSSIEKTISKAKGQPREPQVYTLPPSQEEMTKNQVSLTCLVKGFYPSDIAVEWESNGQPENNYKTTPPVLDSDGSFFLYSRLTVDKSRWQEGNVFSCSVMHEALHNHYTQKSLSLSPGK

SEQ ID NO: 1659 - protein, 107 aa, Artificial Sequence
  source: /note="Description of Artificial Sequence: Synthetic polypeptide"
DIQMTQSPSSLSASVGDRITITCRASQNINVWLSWYQQKPGKAPKLLIYKASKSHTGVPSRFSGSGSGTDFTLTISSLQPEDFATYYCQQGQSYPYTFGQGTKLEIK

SEQ ID NO: 1660 - protein, 11 aa, Artificial Sequence
  source: /note="Description of Artificial Sequence: Synthetic peptide"
RASQNINVWLS

SEQ ID NO: 1661 - protein, 7 aa, Artificial Sequence
  source: /note="Description of Artificial Sequence: Synthetic peptide"
KASKSHT

SEQ ID NO: 1662 - protein, 9 aa, Artificial Sequence
  source: /note="Description of Artificial Sequence: Synthetic peptide"
QQGQSYPYT

SEQ ID NO: 1663 - protein, 214 aa, Artificial Sequence
  source: /note="Description of Artificial Sequence: Synthetic polypeptide"
DIQMTQSPSSLSASVGDRITITCRASQNINVWLSWYQQKPGKAPKLLIYKASKSHTGVPSRFSGSGSGTDFTLTISSLQPEDFATYYCQQGQSYPYTFGQGTKLEIKRTVAAPSVFIFPPSDEQLKSGTASVVCLLNNFYPREAKVQWKVDNALQSGNSQESVTEQDSKDSTYSLSSTLTLSKADYEKHKVYACEVTHQGLSSPVTKSFNRGEC

SEQ ID NO: 1664 - protein, 119 aa, Artificial Sequence
  source: /note="Description of Artificial Sequence: Synthetic polypeptide"
EVQLVESGGGLVQPGGSLRLSCAASGFTFSSYIMSWVRQAPGKGLEWVATISGGSKGQYYADSVKGRFTISRDNSKNTLYLQMNSLRAEDTAVYYCAKWLLSYYAMDYWGQGTLVTVSS

SEQ ID NO: 1665 - protein, 8 aa, Artificial Sequence
  source: /note="Description of Artificial Sequence: Synthetic peptide"
GFTFSSYI

SEQ ID NO: 1666 - protein, 8 aa, Artificial Sequence
  source: /note="Description of Artificial Sequence: Synthetic peptide"
ISGGSKGQ

SEQ ID NO: 1667 - protein, 12 aa, Artificial Sequence
  source: /note="Description of Artificial Sequence: Synthetic peptide"
AKWLLSYYAMDY

SEQ ID NO: 1668 - protein, 107 aa, Artificial Sequence
  source: /note="Description of Artificial Sequence: Synthetic polypeptide"
DIQMTQSPSSLSASVGDRITITCRASQSMAIWLSWYQQKPGKAPKLLIYKASKSHTGVPSRFSGSGSGTDFTLTISSLQPEDFATYYCQQGQSYPYTFGQGTKLEIK

SEQ ID NO: 1669 - protein, 6 aa, Artificial Sequence
  source: /note="Description of Artificial Sequence: Synthetic peptide"
QSMAIW

SEQ ID NO: 1670 - protein, 3 aa, Artificial Sequence
  source: /note="Description of Artificial Sequence: Synthetic peptide"
KAS

SEQ ID NO: 1671 - protein, 9 aa, Artificial Sequence
  source: /note="Description of Artificial Sequence: Synthetic peptide"
QQGQSYPYT

SEQ ID NO: 1672 - protein, 121 aa, Artificial Sequence
  source: /note="Description of Artificial Sequence: Synthetic polypeptide"
QVQLVESGGGLVQPGGSLRLSCAASGFTFSSYGMHWVRQAPGKGLEWVAFIRYDGSNKYYADSVKGRFTISRDNSKNTLYLQMNSLRAEDTAVYYCAKEMLVQDYYYMDVWGQGTTVTVSS

SEQ ID NO: 1673 - protein, 8 aa, Artificial Sequence
  source: /note="Description of Artificial Sequence: Synthetic peptide"
GFTFSSYG

SEQ ID NO: 1674 - protein, 8 aa, Artificial Sequence
  source: /note="Description of Artificial Sequence: Synthetic peptide"
IRYDGSNK

SEQ ID NO: 1675 - protein, 14 aa, Artificial Sequence
  source: /note="Description of Artificial Sequence: Synthetic peptide"
AKEMLVQDYYYMDV

SEQ ID NO: 1676 - protein, 448 aa, Artificial Sequence
  source: /note="Description of Artificial Sequence: Synthetic polypeptide"
QVQLVESGGGLVQPGGSLRLSCAASGFTFSSYGMHWVRQAPGKGLEWVAFIRYDGSNKYYADSVKGRFTISRDNSKNTLYLQMNSLRAEDTAVYYCAKEMLVQDYYYMDVWGQGTTVTVSSASTKGPSVFPLAPCSRSTSESTAALGCLVKDYFPEPVTVSWNSGALTSGVHTFPAVLQSSGLYSLSSVVTVPSSSLGTKTYTCNVDHKPSNTKVDKRVESKYGPPCPPCPAPEFLGGPSVFLFPPKPKDTLMISRTPEVTCVVVDVSQEDPEVQFNWYVDGVEVHNAKTKPREEQFNSTYRVVSVLTVLHQDWLNGKEYKCKVSNKGLPSSIEKTISKAKGQPREPQVYTLPPSQEEMTKNQVSLTCLVKGFYPSDIAVEWESNGQPENNYKTTPPVLDSDGSFFLYSRLTVDKSRWQEGNVFSCSVMHEALHNHYTQKSLSLSPGK

SEQ ID NO: 1677 - protein, 113 aa, Artificial Sequence
  source: /note="Description of Artificial Sequence: Synthetic polypeptide"
DVVMTQSPLSLPVSPGEPASISCRSSQNLLHRNGINYLNWYLQKPGQSPQLLIYWGSNRASGVPDRFSGSGSGTDFTLKISRVEAEDVGVYYCMQGLQIPPTFGQGTKVDIKR

SEQ ID NO: 1678 - protein, 11 aa, Artificial Sequence
  source: /note="Description of Artificial Sequence: Synthetic peptide"
QNLLHRNGINY

SEQ ID NO: 1679 - protein, 3 aa, Artificial Sequence
  source: /note="Description of Artificial Sequence: Synthetic peptide"
WGS

SEQ ID NO: 1680 - protein, 9 aa, Artificial Sequence
  source: /note="Description of Artificial Sequence: Synthetic peptide"
MQGLQIPPT

SEQ ID NO: 1681 - protein, 219 aa, Artificial Sequence
  source: /note="Description of Artificial Sequence: Synthetic polypeptide"
DVVMTQSPLSLPVSPGEPASISCRSSQNLLHRNGINYLNWYLQKPGQSPQLLIYWGSNRASGVPDRFSGSGSGTDFTLKISRVEAEDVGVYYCMQGLQIPPTFGQGTKVDIKRTVAAPSVFIFPPSDEQLKSGTASVVCLLNNFYPREAKVQWKVDNALQSGNSQESVTEQDSKDSTYSLSSTLTLSKADYEKHKVYACEVTHQGLSSPVTKSFNRGEC

SEQ ID NO: 1682 - protein, 121 aa, Artificial Sequence
  source: /note="Description of Artificial Sequence: Synthetic polypeptide"
EVQLVETGGGLIQPGRSLRLSCAASGFTFSSYAMHWVRQAPGKGLEWVAVISYDGSNKYYADSVKGRFTISRDNSKNTLYLQMNSLRAEDTAVYYCARDPLPLHYYGMDVWGQGTTVTVSS

SEQ ID NO: 1683 - protein, 8 aa, Artificial Sequence
  source: /note="Description of Artificial Sequence: Synthetic peptide"
GFTFSSYA

SEQ ID NO: 1684 - protein, 8 aa, Artificial Sequence
  source: /note="Description of Artificial Sequence: Synthetic peptide"
ISYDGSNK

SEQ ID NO: 1685 - protein, 14 aa, Artificial Sequence
  source: /note="Description of Artificial Sequence: Synthetic peptide"
ARDPLPLHYYGMDV

SEQ ID NO: 1686 - protein, 448 aa, Artificial Sequence
  source: /note="Description of Artificial Sequence: Synthetic polypeptide"
EVQLVETGGGLIQPGRSLRLSCAASGFTFSSYAMHWVRQAPGKGLEWVAVISYDGSNKYYADSVKGRFTISRDNSKNTLYLQMNSLRAEDTAVYYCARDPLPLHYYGMDVWGQGTTVTVSSASTKGPSVFPLAPCSRSTSESTAALGCLVKDYFPEPVTVSWNSGALTSGVHTFPAVLQSSGLYSLSSVVTVPSSSLGTKTYTCNVDHKPSNTKVDKRVESKYGPPCPPCPAPEFLGGPSVFLFPPKPKDTLMISRTPEVTCVVVDVSQEDPEVQFNWYVDGVEVHNAKTKPREEQFNSTYRVVSVLTVLHQDWLNGKEYKCKVSNKGLPSSIEKTISKAKGQPREPQVYTLPPSQEEMTKNQVSLTCLVKGFYPSDIAVEWESNGQPENNYKTTPPVLDSDGSFFLYSRLTVDKSRWQEGNVFSCSVMHEALHNHYTQKSLSLSPGK

SEQ ID NO: 1687 - protein, 111 aa, Artificial Sequence
  source: /note="Description of Artificial Sequence: Synthetic polypeptide"
QSALTQPRSASGNPGQRVTISCSGSSSNMGRRPVNWYQQIPGTAPKLLIYSQNQRPSGVPDRFSGSQSGTSASLTISGLQSEDEAEYFCAVWDDSLSSLQLGGGTQLAVLG

SEQ ID NO: 1688 - protein, 8 aa, Artificial Sequence
  source: /note="Description of Artificial Sequence: Synthetic peptide"
SSNMGRRP

SEQ ID NO: 1689 - protein, 3 aa, Artificial Sequence
  source: /note="Description of Artificial Sequence: Synthetic peptide"
SQN

SEQ ID NO: 1690 - protein, 11 aa, Artificial Sequence
  source: /note="Description of Artificial Sequence: Synthetic peptide"
AVWDDSLSSLQ

SEQ ID NO: 1691 - protein, 216 aa, Artificial Sequence
  source: /note="Description of Artificial Sequence: Synthetic polypeptide"
QSALTQPRSASGNPGQRVTISCSGSSSNMGRRPVNWYQQIPGTAPKLLIYSQNQRPSGVPDRFSGSQSGTSASLTISGLQSEDEAEYFCAVWDDSLSSLQLGGGTQLAVLGQPKAAPSVTLFPPSSEELQANKATLVCLISDFYPGAVTVAWKADSSPVKAGVETTTPSKQSNNKYAASSYLSLTPEQWKSHRSYSCQVTHEGSTVEKTVAPTECS

SEQ ID NO: 1692 - protein, 121 aa, Artificial Sequence; identical to SEQ ID NO: 1682
  source: /note="Description of Artificial Sequence: Synthetic polypeptide"

SEQ ID NO: 1693 - protein, 8 aa, Artificial Sequence
  source: /note="Description of Artificial Sequence: Synthetic peptide"
GFTFSSYA

SEQ ID NO: 1694 - protein, 8 aa, Artificial Sequence
  source: /note="Description of Artificial Sequence: Synthetic peptide"
ISYDGSNK

SEQ ID NO: 1695 - protein, 14 aa, Artificial Sequence
  source: /note="Description of Artificial Sequence: Synthetic peptide"
ARDPLPLHYYGMDV

SEQ ID NO: 1696 - protein, 448 aa, Artificial Sequence; identical to SEQ ID NO: 1686
  source: /note="Description of Artificial Sequence: Synthetic polypeptide"

SEQ ID NO: 1697 - protein, 111 aa, Artificial Sequence
  source: /note="Description of Artificial Sequence: Synthetic polypeptide"
QSALTQPRSASGNPGQRVTISCSGSSSNMGRRPVNWYQQIPGTAPKLLIYSQNQRPSGVPDRFSGSQSGTSASLTISGLQSEDEAEYFCAVWDDSLFSLLLGGGTQLAVLG

SEQ ID NO: 1698 - protein, 8 aa, Artificial Sequence
  source: /note="Description of Artificial Sequence: Synthetic peptide"
SSNMGRRP

SEQ ID NO: 1699 - protein, 3 aa, Artificial Sequence
  source: /note="Description of Artificial Sequence: Synthetic peptide"
SQN

SEQ ID NO: 1700 - protein, 11 aa, Artificial Sequence
  source: /note="Description of Artificial Sequence: Synthetic peptide"
AVWDDSLFSLL

SEQ ID NO: 1701 - protein, 216 aa, Artificial Sequence
  source: /note="Description of Artificial Sequence: Synthetic polypeptide"
QSALTQPRSASGNPGQRVTISCSGSSSNMGRRPVNWYQQIPGTAPKLLIYSQNQRPSGVPDRFSGSQSGTSASLTISGLQSEDEAEYFCAVWDDSLFSLLLGGGTQLAVLGQPKAAPSVTLFPPSSEELQANKATLVCLISDFYPGAVTVAWKADSSPVKAGVETTTPSKQSNNKYAASSYLSLTPEQWKSHRSYSCQVTHEGSTVEKTVAPTECS

SEQ ID NO: 1702 - protein, 121 aa, Artificial Sequence
  source: /note="Description of Artificial Sequence: Synthetic polypeptide"
QVQLQESGPGLVKPSETLSLTCTVSGGSISSSSYYWGWIRQPPGKGLEWIGSIYYSGSTYYNPSLKSRVTISVDTSKNQFSLKLSSVTAADTAVYYCARQGAAAGNPFDIWGQGTMVTVSS

SEQ ID NO: 1703 - protein, 10 aa, Artificial Sequence
  source: /note="Description of Artificial Sequence: Synthetic peptide"
GGSISSSSYY

SEQ ID NO: 1704 - protein, 7 aa, Artificial Sequence
  source: /note="Description of Artificial Sequence: Synthetic peptide"
IYYSGST

SEQ ID NO: 1705 - protein, 13 aa, Artificial Sequence
  source: /note="Description of Artificial Sequence: Synthetic peptide"
ARQGAAAGNPFDI

SEQ ID NO: 1706 - protein, 448 aa, Artificial Sequence
  source: /note="Description of Artificial Sequence: Synthetic polypeptide"
QVQLQESGPGLVKPSETLSLTCTVSGGSISSSSYYWGWIRQPPGKGLEWIGSIYYSGSTYYNPSLKSRVTISVDTSKNQFSLKLSSVTAADTAVYYCARQGAAAGNPFDIWGQGTMVTVSSASTKGPSVFPLAPCSRSTSESTAALGCLVKDYFPEPVTVSWNSGALTSGVHTFPAVLQSSGLYSLSSVVTVPSSSLGTKTYTCNVDHKPSNTKVDKRVESKYGPPCPPCPAPEFLGGPSVFLFPPKPKDTLMISRTPEVTCVVVDVSQEDPEVQFNWYVDGVEVHNAKTKPREEQFNSTYRVVSVLTVLHQDWLNGKEYKCKVSNKGLPSSIEKTISKAKGQPREPQVYTLPPSQEEMTKNQVSLTCLVKGFYPSDIAVEWESNGQPENNYKTTPPVLDSDGSFFLYSRLTVDKSRWQEGNVFSCSVMHEALHNHYTQKSLSLSPGK

SEQ ID NO: 1707 - protein, 111 aa, Artificial Sequence
  source: /note="Description of Artificial Sequence: Synthetic polypeptide"
QSVLTQPPSVSGTPGQRVTISCSGSSSNIGSNFVYWHQQLTGTAPKLLIYRNTQRPSGVPDRFSGSKSGTSASLAIGGLRSEDEADYYCATWDDSLSAWVFGGGTKLTVLG

SEQ ID NO: 1708 - protein, 8 aa, Artificial Sequence
  source: /note="Description of Artificial Sequence: Synthetic peptide"
SSNIGSNF

SEQ ID NO: 1709 - protein, 3 aa, Artificial Sequence
  source: /note="Description of Artificial Sequence: Synthetic peptide"
RNT

SEQ ID NO: 1710 - protein, 11 aa, Artificial Sequence
  source: /note="Description of Artificial Sequence: Synthetic peptide"
ATWDDSLSAWV

SEQ ID NO: 1711 - protein, 216 aa, Artificial Sequence
  source: /note="Description of Artificial Sequence: Synthetic polypeptide"
QSVLTQPPSVSGTPGQRVTISCSGSSSNIGSNFVYWHQQLTGTAPKLLIYRNTQRPSGVPDRFSGSKSGTSASLAIGGLRSEDEADYYCATWDDSLSAWVFGGGTKLTVLGQPKAAPSVTLFPPSSEELQANKATLVCLISDFYPGAVTVAWKADSSPVKAGVETTTPSKQSNNKYAASSYLSLTPEQWKSHRSYSCQVTHEGSTVEKTVAPTECS

SEQ ID NO: 1712 - protein, 119 aa, Artificial Sequence
  source: /note="Description of Artificial Sequence: Synthetic polypeptide"
EVQLVETGGGLIQPGGSLRLSCAASGFTVSSNYMSWVRQAPGKGLEWVSVIYSGGSTYYADSVKGRFTISRDNSKNTLYLQMNSLRAEDTAVYYCARGARYSYGQYPYWGQGTLVTVSS

SEQ ID NO: 1713 - protein, 8 aa, Artificial Sequence
  source: /note="Description of Artificial Sequence: Synthetic peptide"
GFTVSSNY

SEQ ID NO: 1714 - protein, 7 aa, Artificial Sequence
  source: /note="Description of Artificial Sequence: Synthetic peptide"
IYSGGST

SEQ ID NO: 1715 - protein, 13 aa, Artificial Sequence
  source: /note="Description of Artificial Sequence: Synthetic peptide"
ARGARYSYGQYPY

SEQ ID NO: 1716 - protein, 446 aa, Artificial Sequence
  source: /note="Description of Artificial Sequence: Synthetic polypeptide"
EVQLVETGGGLIQPGGSLRLSCAASGFTVSSNYMSWVRQAPGKGLEWVSVIYSGGSTYYADSVKGRFTISRDNSKNTLYLQMNSLRAEDTAVYYCARGARYSYGQYPYWGQGTLVTVSSASTKGPSVFPLAPCSRSTSESTAALGCLVKDYFPEPVTVSWNSGALTSGVHTFPAVLQSSGLYSLSSVVTVPSSSLGTKTYTCNVDHKPSNTKVDKRVESKYGPPCPPCPAPEFLGGPSVFLFPPKPKDTLMISRTPEVTCVVVDVSQEDPEVQFNWYVDGVEVHNAKTKPREEQFNSTYRVVSVLTVLHQDWLNGKEYKCKVSNKGLPSSIEKTISKAKGQPREPQVYTLPPSQEEMTKNQVSLTCLVKGFYPSDIAVEWESNGQPENNYKTTPPVLDSDGSFFLYSRLTVDKSRWQEGNVFSCSVMHEALHNHYTQKSLSLSPGK

SEQ ID NO: 1717 - protein, 109 aa, Artificial Sequence
  source: /note="Description of Artificial Sequence: Synthetic polypeptide"
DIQLTQSPSFLSASVGDRVTITCRASHDISSLFSWYQQKPGKAPKLLIYAASTLQTGVPSRFSGSASGTEFTLTISSLQPEDFATYYCLQLDSFPTWTFGQGTKVEIKR

SEQ ID NO: 1718 - protein, 6 aa, Artificial Sequence
  source: /note="Description of Artificial Sequence: Synthetic peptide"
HDISSL

SEQ ID NO: 1719 - protein, 3 aa, Artificial Sequence
  source: /note="Description of Artificial Sequence: Synthetic peptide"
AAS

SEQ ID NO: 1720 - protein, 10 aa, Artificial Sequence
  source: /note="Description of Artificial Sequence: Synthetic peptide"
LQLDSFPTWT

SEQ ID NO: 1721 - protein, 215 aa, Artificial Sequence
  source: /note="Description of Artificial Sequence: Synthetic polypeptide"
DIQLTQSPSFLSASVGDRVTITCRASHDISSLFSWYQQKPGKAPKLLIYAASTLQTGVPSRFSGSASGTEFTLTISSLQPEDFATYYCLQLDSFPTWTFGQGTKVEIKRTVAAPSVFIFPPSDEQLKSGTASVVCLLNNFYPREAKVQWKVDNALQSGNSQESVTEQDSKDSTYSLSSTLTLSKADYEKHKVYACEVTHQGLSSPVTKSFNRGEC

SEQ ID NO: 1722 - protein, 121 aa, Artificial Sequence; identical to SEQ ID NO: 1644
  source: /note="Description of Artificial Sequence: Synthetic polypeptide"

SEQ ID NO: 1723 - protein, 8 aa, Artificial Sequence
  source: /note="Description of Artificial Sequence: Synthetic peptide"
GFTFSSYA

SEQ ID NO: 1724 - protein, 8 aa, Artificial Sequence
  source: /note="Description of Artificial Sequence: Synthetic peptide"
ISYDGTPV

SEQ ID NO: 1725 - protein, 14 aa, Artificial Sequence
  source: /note="Description of Artificial Sequence: Synthetic peptide"
ARDPLPLHYYGMDV

SEQ ID NO: 1726 - protein, 448 aa, Artificial Sequence; identical to SEQ ID NO: 1648
  source: /note="Description of Artificial Sequence: Synthetic polypeptide"

SEQ ID NO: 1727 - protein, 111 aa, Artificial Sequence; identical to SEQ ID NO: 1649
  source: /note="Description of Artificial Sequence: Synthetic polypeptide"

SEQ ID NO: 1728 - protein, 8 aa, Artificial Sequence
  source: /note="Description of Artificial Sequence: Synthetic peptide"
SSNMGRRP

SEQ ID NO: 1729 - protein, 3 aa, Artificial Sequence
  source: /note="Description of Artificial Sequence: Synthetic peptide"
SQN

SEQ ID NO: 1730 - protein, 11 aa, Artificial Sequence
  source: /note="Description of Artificial Sequence: Synthetic peptide"
AVWDGDRRSLQ

SEQ ID NO: 1731 - protein, 216 aa, Artificial Sequence; identical to SEQ ID NO: 1653
  source: /note="Description of Artificial Sequence: Synthetic polypeptide"

SEQ ID NO: 1732 - protein, 121 aa, Artificial Sequence; identical to SEQ ID NO: 1634
  source: /note="Description of Artificial Sequence: Synthetic polypeptide"

SEQ ID NO: 1733 - protein, 8 aa, Artificial Sequence
  source: /note="Description of Artificial Sequence: Synthetic peptide"
GFTFSSYA

SEQ ID NO: 1734 - protein, 8 aa, Artificial Sequence
  source: /note="Description of Artificial Sequence: Synthetic peptide"
ISYAGEVK

SEQ ID NO: 1735 - protein, 14 aa, Artificial Sequence
  source: /note="Description of Artificial Sequence: Synthetic peptide"
ARDPLPLHYYGMDV

SEQ ID NO: 1736 - protein, 448 aa, Artificial Sequence; identical to SEQ ID NO: 1638
  source: /note="Description of Artificial Sequence: Synthetic polypeptide"

SEQ ID NO: 1737 - protein, 110 aa, Artificial Sequence; identical to SEQ ID NO: 1639
  source: /note="Description of Artificial Sequence: Synthetic polypeptide"

SEQ ID NO: 1738 - protein, 8 aa, Artificial Sequence
  source: /note="Description of Artificial Sequence: Synthetic peptide"
SSNMGRRP

SEQ ID NO: 1739 - protein, 3 aa, Artificial Sequence
  source: /note="Description of Artificial Sequence: Synthetic peptide"
SQN

SEQ ID NO: 1740 - protein, 11 aa, Artificial Sequence
  source: /note="Description of Artificial Sequence: Synthetic peptide"
AVWDDIGRVLQ

SEQ ID NO: 1741 - protein, 216 aa, Artificial Sequence; identical to SEQ ID NO: 1643
  source: /note="Description of Artificial Sequence: Synthetic polypeptide"

SEQ ID NO: 1742 - protein, 121 aa, Artificial Sequence
  source: /note="Description of Artificial Sequence: Synthetic polypeptide"
EVQLVETGGGLIQPGRSLRLSCAASGFTFSSYAMHWVRQAPGKGLEWVAVISYDRTPVYYADSVKGRFTISRDNSKNTLYLQMNSLRAEDTAVYYCARDPLPLHYYGMDVWGQGTTVTVSS

SEQ ID NO: 1743 - protein, 8 aa, Artificial Sequence
  source: /note="Description of Artificial Sequence: Synthetic peptide"
GFTFSSYA

SEQ ID NO: 1744 - protein, 8 aa, Artificial Sequence
  source: /note="Description of Artificial Sequence: Synthetic peptide"
ISYDRTPV

SEQ ID NO: 1745 - protein, 14 aa, Artificial Sequence
  source: /note="Description of Artificial Sequence: Synthetic peptide"
ARDPLPLHYYGMDV

SEQ ID NO: 1746 - protein, 448 aa, Artificial Sequence
  source: /note="Description of Artificial Sequence: Synthetic polypeptide"
EVQLVETGGGLIQPGRSLRLSCAASGFTFSSYAMHWVRQAPGKGLEWVAVISYDRTPVYYADSVKGRFTISRDNSKNTLYLQMNSLRAEDTAVYYCARDPLPLHYYGMDVWGQGTTVTVSSASTKGPSVFPLAPCSRSTSESTAALGCLVKDYFPEPVTVSWNSGALTSGVHTFPAVLQSSGLYSLSSVVTVPSSSLGTKTYTCNVDHKPSNTKVDKRVESKYGPPCPPCPAPEFLGGPSVFLFPPKPKDTLMISRTPEVTCVVVDVSQEDPEVQFNWYVDGVEVHNAKTKPREEQFNSTYRVVSVLTVLHQDWLNGKEYKCKVSNKGLPSSIEKTISKAKGQPREPQVYTLPPSQEEMTKNQVSLTCLVKGFYPSDIAVEWESNGQPENNYKTTPPVLDSDGSFFLYSRLTVDKSRWQEGNVFSCSVMHEALHNHYTQKSLSLSPGK

SEQ ID NO: 1747 - protein, 111 aa, Artificial Sequence
  source: /note="Description of Artificial Sequence: Synthetic polypeptide"
QSALTQPRSASGNPGQRVTISCSGSSSNMGRRPVNWYQQIPGTAPKLLIYSQNQRPSGVPDRFSGSQSGTSASLTISGLQSEDEAEYFCATWDDSLPRLNFGGGTKLAVLG

SEQ ID NO: 1748 - protein, 8 aa, Artificial Sequence
  source: /note="Description of Artificial Sequence: Synthetic peptide"
SSNMGRRP

SEQ ID NO: 1749 - protein, 3 aa, Artificial Sequence
  source: /note="Description of Artificial Sequence: Synthetic peptide"
SQN

SEQ ID NO: 1750 - protein, 11 aa, Artificial Sequence
  source: /note="Description of Artificial Sequence: Synthetic peptide"
ATWDDSLPRLN

SEQ ID NO: 1751 - protein, 216 aa, Artificial Sequence
  source: /note="Description of Artificial Sequence: Synthetic polypeptide"
QSALTQPRSASGNPGQRVTISCSGSSSNMGRRPVNWYQQIPGTAPKLLIYSQNQRPSGVPDRFSGSQSGTSASLTISGLQSEDEAEYFCATWDDSLPRLNFGGGTKLAVLGQPKAAPSVTLFPPSSEELQANKATLVCLISDFYPGAVTVAWKADSSPVKAGVETTTPSKQSNNKYAASSYLSLTPEQWKSHRSYSCQVTHEGSTVEKTVAPTECS

SEQ ID NO: 1752 - protein, 121 aa, Artificial Sequence
  source: /note="Description of Artificial Sequence: Synthetic polypeptide"
EVQLVETGGGLIQPGRSLRLSCAASGFTFSSYAMHWVRQAPGKGLEWVAVISYEGDRKYYADSVKGRFTISRDNSKNTLYLQMNSLRAEDTAVYYCARDPLPLHYYGMDVWGQGTTVTVSS

SEQ ID NO: 1753 - protein, 8 aa, Artificial Sequence
  source: /note="Description of Artificial Sequence: Synthetic peptide"
GFTFSSYA

SEQ ID NO: 1754 - protein, 8 aa, Artificial Sequence
  source: /note="Description of Artificial Sequence: Synthetic peptide"
ISYEGDRK

SEQ ID NO: 1755 - protein, 14 aa, Artificial Sequence
  source: /note="Description of Artificial Sequence: Synthetic peptide"
ARDPLPLHYYGMDV

SEQ ID NO: 1756 - protein, 448 aa, Artificial Sequence
  source: /note="Description of Artificial Sequence: Synthetic polypeptide"
EVQLVETGGGLIQPGRSLRLSCAASGFTFSSYAMHWVRQAPGKGLEWVAVISYEGDRKYYADSVKGRFTISRDNSKNTLYLQMNSLRAEDTAVYYCARDPLPLHYYGMDVWGQGTTVTVSSASTKGPSVFPLAPCSRSTSESTAALGCLVKDYFPEPVTVSWNSGALTSGVHTFPAVLQSSGLYSLSSVVTVPSSSLGTKTYTCNVDHKPSNTKVDKRVESKYGPPCPPCPAPEFLGGPSVFLFPPKPKDTLMISRTPEVTCVVVDVSQEDPEVQFNWYVDGVEVHNAKTKPREEQFNSTYRVVSVLTVLHQDWLNGKEYKCKVSNKGLPSSIEKTISKAKGQPREPQVYTLPPSQEEMTKNQVSLTCLVKGFYPSDIAVEWESNGQPENNYKTTPPVLDSDGSFFLYSRLTVDKSRWQEGNVFSCSVMHEALHNHYTQKSLSLSPGK

SEQ ID NO: 1757 - protein, 111 aa, Artificial Sequence
  source: /note="Description of Artificial Sequence: Synthetic polypeptide"
QSALTQPRSASGNPGQRVTISCSGSSSNMGRRPVNWYQQIPGTAPKLLIYSQNQRPSGVPDRFSGSQSGTSASLTISGLQSEDEAEYFCATWDDSTPHGVFGGGTKLAVLG

SEQ ID NO: 1758 - protein, 8 aa, Artificial Sequence
  source: /note="Description of Artificial Sequence: Synthetic peptide"
SSNMGRRP

SEQ ID NO: 1759 - protein, 3 aa, Artificial Sequence
  source: /note="Description of Artificial Sequence: Synthetic peptide"
SQN

SEQ ID NO: 1760 - protein, 11 aa, Artificial Sequence
  source: /note="Description of Artificial Sequence: Synthetic peptide"
ATWDDSTPHGV

SEQ ID NO: 1761 - protein, 216 aa, Artificial Sequence
  source: /note="Description of Artificial Sequence: Synthetic polypeptide"
QSALTQPRSASGNPGQRVTISCSGSSSNMGRRPVNWYQQIPGTAPKLLIYSQNQRPSGVPDRFSGSQSGTSASLTISGLQSEDEAEYFCATWDDSTPHGVFGGGTKLAVLGQPKAAPSVTLFPPSSEELQANKATLVCLISDFYPGAVTVAWKADSSPVKAGVETTTPSKQSNNKYAASSYLSLTPEQWKSHRSYSCQVTHEGSTVEKTVAPTECS

SEQ ID NO: 1762 - protein, 118 aa, Artificial Sequence
  source: /note="Description of Artificial Sequence: Synthetic polypeptide"
EVQLVETGGGLIQPGGSLRLSCAASGFTVSSNYMSWVRQAPGKGLEWVSVIYSGGSTYYADSVKGRFTISRDNSKNTLYLQMNSLRAEDTAVYYCARGAPLFGQYPYWGQGTLVTVSS

SEQ ID NO: 1763 - protein, 8 aa, Artificial Sequence
  source: /note="Description of Artificial Sequence: Synthetic peptide"
GFTVSSNY

SEQ ID NO: 1764 - protein, 7 aa, Artificial Sequence
  source: /note="Description of Artificial Sequence: Synthetic peptide"
IYSGGST

SEQ ID NO: 1765 - protein, 12 aa, Artificial Sequence
  source: /note="Description of Artificial Sequence: Synthetic peptide"
ARGAPLFGQYPY

SEQ ID NO: 1766 - protein, 445 aa, Artificial Sequence
  source: /note="Description of Artificial Sequence: Synthetic polypeptide"
EVQLVETGGGLIQPGGSLRLSCAASGFTVSSNYMSWVRQAPGKGLEWVSVIYSGGSTYYADSVKGRFTISRDNSKNTLYLQMNSLRAEDTAVYYCARGAPLFGQYPYWGQGTLVTVSSASTKGPSVFPLAPCSRSTSESTAALGCLVKDYFPEPVTVSWNSGALTSGVHTFPAVLQSSGLYSLSSVVTVPSSSLGTKTYTCNVDHKPSNTKVDKRVESKYGPPCPPCPAPEFLGGPSVFLFPPKPKDTLMISRTPEVTCVVVDVSQEDPEVQFNWYVDGVEVHNAKTKPREEQFNSTYRVVSVLTVLHQDWLNGKEYKCKVSNKGLPSSIEKTISKAKGQPREPQVYTLPPSQEEMTKNQVSLTCLVKGFYPSDIAVEWESNGQPENNYKTTPPVLDSDGSFFLYSRLTVDKSRWQEGNVFSCSVMHEALHNHYTQKSLSLSPGK

SEQ ID NO: 1767 - protein, 109 aa, Artificial Sequence
  source: /note="Description of Artificial Sequence: Synthetic polypeptide"
DIQMTQSPSSLSASVGDRVTITCRASHAIASLFSWYQQKPGKAPKLLIYAASTLQTGVPSRFSGSASGTEFTLTISSLQPEDFATYYCLQLDSFPTWTFGQGTKVEIKR

SEQ ID NO: 1768 - protein, 6 aa, Artificial Sequence
  source: /note="Description of Artificial Sequence: Synthetic peptide"
HAIASL

SEQ ID NO: 1769 - protein, 3 aa, Artificial Sequence
  source: /note="Description of Artificial Sequence: Synthetic peptide"
AAS

SEQ ID NO: 1770 - protein, 10 aa, Artificial Sequence
  source: /note="Description of Artificial Sequence: Synthetic peptide"
LQLDSFPTWT

SEQ ID NO: 1771 - protein, 215 aa, Artificial Sequence
  source: /note="Description of Artificial Sequence: Synthetic polypeptide"
DIQMTQSPSSLSASVGDRVTITCRASHAIASLFSWYQQKPGKAPKLLIYAASTLQTGVPSRFSGSASGTEFTLTISSLQPEDFATYYCLQLDSFPTWTFGQGTKVEIKRTVAAPSVFIFPPSDEQLKSGTASVVCLLNNFYPREAKVQWKVDNALQSGNSQESVTEQDSKDSTYSLSSTLTLSKADYEKHKVYACEVTHQGLSSPVTKSFNRGEC

SEQ ID NO: 1772 - protein, 118 aa, Artificial Sequence
  source: /note="Description of Artificial Sequence: Synthetic polypeptide"
EVQLVETGGGLIQPGGSLRLSCAASGFTVSSNYMSWVRQAPGKGLEWVSVIYSGGSTYYADSVKGRFTISRDNSKNTLYLQMNSLRAEDTAVYYCARGARPNGQYPYWGQGTLVTVSS

SEQ ID NO: 1773 - protein, 8 aa, Artificial Sequence
  source: /note="Description of Artificial Sequence: Synthetic peptide"
GFTVSSNY

SEQ ID NO: 1774 - protein, 7 aa, Artificial Sequence
  source: /note="Description of Artificial Sequence: Synthetic peptide"
IYSGGST

SEQ ID NO: 1775 - protein, 12 aa, Artificial Sequence
  source: /note="Description of Artificial Sequence: Synthetic peptide"
ARGARPNGQYPY

SEQ ID NO: 1776 - protein, 445 aa, Artificial Sequence
  source: /note="Description of Artificial Sequence: Synthetic polypeptide"
EVQLVETGGGLIQPGGSLRLSCAASGFTVSSNYMSWVRQAPGKGLEWVSVIYSGGSTYYADSVKGRFTISRDNSKNTLYLQMNSLRAEDTAVYYCARGARPNGQYPYWGQGTLVTVSSASTKGPSVFPLAPCSRSTSESTAALGCLVKDYFPEPVTVSWNSGALTSGVHTFPAVLQSSGLYSLSSVVTVPSSSLGTKTYTCNVDHKPSNTKVDKRVESKYGPPCPPCPAPEFLGGPSVFLFPPKPKDTLMISRTPEVTCVVVDVSQEDPEVQFNWYVDGVEVHNAKTKPREEQFNSTYRVVSVLTVLHQDWLNGKEYKCKVSNKGLPSSIEKTISKAKGQPREPQVYTLPPSQEEMTKNQVSLTCLVKGFYPSDIAVEWESNGQPENNYKTTPPVLDSDGSFFLYSRLTVDKSRWQEGNVFSCSVMHEALHNHYTQKSLSLSPGK

SEQ ID NO: 1777 - protein, 109 aa, Artificial Sequence
  source: /note="Description of Artificial Sequence: Synthetic polypeptide"
DIQLTQSPSFLSASVGDRVTITCRASHGIKSLFSWYQQKPGKAPKLLIYAASTLQTGVPSRFSGSASGTEFTLTISSLQPEDFATYYCLQLDSFPTWTFGQGTKVEIKR

SEQ ID NO: 1778 - protein, 6 aa, Artificial Sequence
  source: /note="Description of Artificial Sequence: Synthetic peptide"
HGIKSL

SEQ ID NO: 1779 - protein, 3 aa, Artificial Sequence
  source: /note="Description of Artificial Sequence: Synthetic peptide"
AAS

SEQ ID NO: 1780 - protein, 10 aa, Artificial Sequence
  source: /note="Description of Artificial Sequence: Synthetic peptide"
LQLDSFPTWT

SEQ ID NO: 1781 - protein, 215 aa, Artificial Sequence
  source: /note="Description of Artificial Sequence: Synthetic polypeptide"
DIQLTQSPSFLSASVGDRVTITCRASHGIKSLFSWYQQKPGKAPKLLIYAASTLQTGVPSRFSGSASGTEFTLTISSLQPEDFATYYCLQLDSFPTWTFGQGTKVEIKRTVAAPSVFIFPPSDEQLKSGTASVVCLLNNFYPREAKVQWKVDNALQSGNSQESVTEQDSKDSTYSLSSTLTLSKADYEKHKVYACEVTHQGLSSPVTKSFNRGEC

SEQ ID NO: 1782 - protein, 119 aa, Artificial Sequence
  source: /note="Description of Artificial Sequence: Synthetic polypeptide"
EVQLQQSGPELVKPGSSVKMSCKASGYTFSSYVMHWVKQKPGQGLEWIGYIDPYNDGAKYNEKFKGKATLTSDKSSSTAYMELSSLTSEDSAVYYCARGGPYGWYFDVWGAGTTVTVSS

SEQ ID NO: 1783 - protein, 8 aa, Artificial Sequence
  source: /note="Description of Artificial Sequence: Synthetic peptide"
GYTFSSYV

SEQ ID NO: 1784 - protein, 8 aa, Artificial Sequence
  source: /note="Description of Artificial Sequence: Synthetic peptide"
IDPYNDGA

SEQ ID NO: 1785 - protein, 12 aa, Artificial Sequence
  source: /note="Description of Artificial Sequence: Synthetic peptide"
ARGGPYGWYFDV

SEQ ID NO: 1786 - protein, 446 aa, Artificial Sequence
  source: /note="Description of Artificial Sequence: Synthetic polypeptide"
EVQLQQSGPELVKPGSSVKMSCKASGYTFSSYVMHWVKQKPGQGLEWIGYIDPYNDGAKYNEKFKGKATLTSDKSSSTAYMELSSLTSEDSAVYYCARGGPYGWYFDVWGAGTTVTVSSASTKGPSVFPLAPCSRSTSESTAALGCLVKDYFPEPVTVSWNSGALTSGVHTFPAVLQSSGLYSLSSVVTVPSSSLGTKTYTCNVDHKPSNTKVDKRVESKYGPPCPPCPAPEFLGGPSVFLFPPKPKDTLMISRTPEVTCVVVDVSQEDPEVQFNWYVDGVEVHNAKTKPREEQFNSTYRVVSVLTVLHQDWLNGKEYKCKVSNKGLPSSIEKTISKAKGQPREPQVYTLPPSQEEMTKNQVSLTCLVKGFYPSDIAVEWESNGQPENNYKTTPPVLDSDGSFFLYSRLTVDKSRWQEGNVFSCSVMHEALHNHYTQKSLSLSPGK

SEQ ID NO: 1787 - protein, 107 aa, Artificial Sequence
  source: /note="Description of Artificial Sequence: Synthetic polypeptide"
DIQMTQSPASLSASVGETVTITCRASEHIYSYLSWYQQKQGKSPQLLVYNAKTLAEGVPSRFSGSGSGTQFSLKINSLQPEDFGTYYCQHHFGSPLTFGAGTTLELK

SEQ ID NO: 1788 - protein, 6 aa, Artificial Sequence
  source: /note="Description of Artificial Sequence: Synthetic peptide"
EHIYSY

SEQ ID NO: 1789 - protein, 3 aa, Artificial Sequence
  source: /note="Description of Artificial Sequence: Synthetic peptide"
NAK

SEQ ID NO: 1790 - protein, 9 aa, Artificial Sequence
  source: /note="Description of Artificial Sequence: Synthetic peptide"
QHHFGSPLT

SEQ ID NO: 1791 - protein, 214 aa, Artificial Sequence
  source: /note="Description of Artificial Sequence: Synthetic polypeptide"
DIQMTQSPASLSASVGETVTITCRASEHIYSYLSWYQQKQGKSPQLLVYNAKTLAEGVPSRFSGSGSGTQFSLKINSLQPEDFGTYYCQHHFGSPLTFGAGTTLELKRTVAAPSVFIFPPSDEQLKSGTASVVCLLNNFYPREAKVQWKVDNALQSGNSQESVTEQDSKDSTYSLSSTLTLSKADYEKHKVYACEVTHQGLSSPVTKSFNRGEC

SEQ ID NO: 1792 - protein, 130 aa, Artificial Sequence
  source: /note="Description of Artificial Sequence: Synthetic polypeptide"
QVHLQESGPGLVKPSETLSLTCTVSGGSVSSGIYYWSWIRQPPGKGLEWIGYIYYSGSTNYNPSLKSRVTISVDTSKNQFSLKLSSVTAADTAVYYCARDYYVSGNYYNVDYYFFGVDVWGQGTTVTVSS

SEQ ID NO: 1793 - protein, 10 aa, Artificial Sequence
  source: /note="Description of Artificial Sequence: Synthetic peptide"
GGSVSSGIYY

SEQ ID NO: 1794 - protein, 7 aa, Artificial Sequence
  source: /note="Description of Artificial Sequence: Synthetic peptide"
IYYSGST

SEQ ID NO: 1795 - protein, 22 aa, Artificial Sequence
  source: /note="Description of Artificial Sequence: Synthetic peptide"
ARDYYVSGNYYNVDYYFFGVDV

SEQ ID NO: 1796 - protein, 457 aa, Artificial Sequence
  source: /note="Description of Artificial Sequence: Synthetic polypeptide"
QVHLQESGPGLVKPSETLSLTCTVSGGSVSSGIYYWSWIRQPPGKGLEWIGYIYYSGSTNYNPSLKSRVTISVDTSKNQFSLKLSSVTAADTAVYYCARDYYVSGNYYNVDYYFFGVDVWGQGTTVTVSSASTKGPSVFPLAPCSRSTSESTAALGCLVKDYFPEPVTVSWNSGALTSGVHTFPAVLQSSGLYSLSSVVTVPSSSLGTKTYTCNVDHKPSNTKVDKRVESKYGPPCPPCPAPEFLGGPSVFLFPPKPKDTLMISRTPEVTCVVVDVSQEDPEVQFNWYVDGVEVHNAKTKPREEQFNSTYRVVSVLTVLHQDWLNGKEYKCKVSNKGLPSSIEKTISKAKGQPREPQVYTLPPSQEEMTKNQVSLTCLVKGFYPSDIAVEWESNGQPENNYKTTPPVLDSDGSFFLYSRLTVDKSRWQEGNVFSCSVMHEALHNHYTQKSLSLSPGK

SEQ ID NO: 1797 - protein, 109 aa, Artificial Sequence
  source: /note="Description of Artificial Sequence: Synthetic polypeptide"
EIVLTQSPATLSLSPGERATLSCRASQSVSSYLAWYQQKPGQAPRLLIYDASNRATGIPARFSGSGSGTDFTLTISSLEPEDFAVYYCQQRSNWPPLFTFGPGTKVDIK

SEQ ID NO: 1798 - protein, 6 aa, Artificial Sequence
  source: /note="Description of Artificial Sequence: Synthetic peptide"
QSVSSY

SEQ ID NO: 1799 - protein, 3 aa, Artificial Sequence
  source: /note="Description of Artificial Sequence: Synthetic peptide"
DAS

SEQ ID NO: 1800 - protein, 11 aa, Artificial Sequence
  source: /note="Description of Artificial Sequence: Synthetic peptide"
QQRSNWPPLFT

SEQ ID NO: 1801 - protein, 216 aa, Artificial Sequence
  source: /note="Description of Artificial Sequence: Synthetic polypeptide"
EIVLTQSPATLSLSPGERATLSCRASQSVSSYLAWYQQKPGQAPRLLIYDASNRATGIPARFSGSGSGTDFTLTISSLEPEDFAVYYCQQRSNWPPLFTFGPGTKVDIKRTVAAPSVFIFPPSDEQLKSGTASVVCLLNNFYPREAKVQWKVDNALQSGNSQESVTEQDSKDSTYSLSSTLTLSKADYEKHKVYACEVTHQGLSSPVTKSFNRGEC

SEQ ID NO: 1802 - protein, 119 aa, Artificial Sequence
  source: /note="Description of Artificial Sequence: Synthetic polypeptide"
QVQLVQSGAEVKKPGASVKVSCKASGYTFTEYTLHWVRQAPGQGLEWMGGINPNNGGTSYAQKFQGRVTMTRDTSTSTVYMELSSLRSEDTAVYYCARSGYYDYSFAYWGQGTLVTVSS

SEQ ID NO: 1803 - protein, 10 aa, Artificial Sequence
  source: /note="Description of Artificial Sequence: Synthetic peptide"
GYTFTEYTLH

SEQ ID NO: 1804 - protein, 10 aa, Artificial Sequence
  source: /note="Description of Artificial Sequence: Synthetic peptide"
GINPNNGGTS

SEQ ID NO: 1805 - protein, 10 aa, Artificial Sequence
  source: /note="Description of Artificial Sequence: Synthetic peptide"
SGYYDYSFAY

SEQ ID NO: 1806 - protein, 446 aa, Artificial Sequence
  source: /note="Description of Artificial Sequence: Synthetic polypeptide"
QVQLVQSGAEVKKPGASVKVSCKASGYTFTEYTLHWVRQAPGQGLEWMGGINPNNGGTSYAQKFQGRVTMTRDTSTSTVYMELSSLRSEDTAVYYCARSGYYDYSFAYWGQGTLVTVSSASTKGPSVFPLAPCSRSTSESTAALGCLVKDYFPEPVTVSWNSGALTSGVHTFPAVLQSSGLYSLSSVVTVPSSSLGTKTYTCNVDHKPSNTKVDKRVESKYGPPCPPCPAPEFLGGPSVFLFPPKPKDTLMISRTPEVTCVVVDVSQEDPEVQFNWYVDGVEVHNAKTKPREEQFNSTYRVVSVLTVLHQDWLNGKEYKCKVSNKGLPSSIEKTISKAKGQPREPQVYTLPPSQEEMTKNQVSLTCLVKGFYPSDIAVEWESNGQPENNYKTTPPVLDSDGSFFLYSRLTVDKSRWQEGNVFSCSVMHEALHNHYTQKSLSLSPGK

SEQ ID NO: 1807 - protein, 107 aa, Artificial Sequence
  source: /note="Description of Artificial Sequence: Synthetic polypeptide"
DIQMTQSPSSLSASVGDRVTITCRASQDVKNAVVWYQQKPGKAPKLLIYSPSYRYTGVPSRFSGSGSGTDFTLTISSLQPEDFATYYCQQHYSTPFTFGQGTKLEIK

SEQ ID NO: 1808 - protein, 11 aa, Artificial Sequence
  source: /note="Description of Artificial Sequence: Synthetic peptide"
RASQDVKNAVV

SEQ ID NO: 1809 - protein, 7 aa, Artificial Sequence
  source: /note="Description of Artificial Sequence: Synthetic peptide"
SPSYRYT

SEQ ID NO: 1810 - protein, 9 aa, Artificial Sequence
  source: /note="Description of Artificial Sequence: Synthetic peptide"
QQHYSTPFT

SEQ ID NO: 1811 - protein, 214 aa, Artificial Sequence
  source: /note="Description of Artificial Sequence: Synthetic polypeptide"
DIQMTQSPSSLSASVGDRVTITCRASQDVKNAVVWYQQKPGKAPKLLIYSPSYRYTGVPSRFSGSGSGTDFTLTISSLQPEDFATYYCQQHYSTPFTFGQGTKLEIKRTVAAPSVFIFPPSDEQLKSGTASVVCLLNNFYPREAKVQWKVDNALQSGNSQESVTEQDSKDSTYSLSSTLTLSKADYEKHKVYACEVTHQGLSSPVTKSFNRGEC

SEQ ID NO: 1812 - protein, 119 aa, Artificial Sequence
  source: /note="Description of Artificial Sequence: Synthetic polypeptide"
QVQLVQSGAEVKKPGASVKVSCKTSGYTFTEYTLHWVRQAPGQGLEWIGGINPNNGGTSYAQKFQGRVTMTVDTSTSTVYMELSSLRSEDTAVYYCAGSGYYDYSFAYWGQGTLVTVSS

SEQ ID NO: 1813 - protein, 10 aa, Artificial Sequence
  source: /note="Description of Artificial Sequence: Synthetic peptide"
GYTFTEYTLH

SEQ ID NO: 1814 - protein, 10 aa, Artificial Sequence
  source: /note="Description of Artificial Sequence: Synthetic peptide"
GINPNNGGTS

SEQ ID NO: 1815 - protein, 10 aa, Artificial Sequence
  source: /note="Description of Artificial Sequence: Synthetic peptide"
SGYYDYSFAY

SEQ ID NO: 1816 - protein, 446 aa, Artificial Sequence
  source: /note="Description of Artificial Sequence: Synthetic polypeptide"
QVQLVQSGAEVKKPGASVKVSCKTSGYTFTEYTLHWVRQAPGQGLEWIGGINPNNGGTSYAQKFQGRVTMTVDTSTSTVYMELSSLRSEDTAVYYCAGSGYYDYSFAYWGQGTLVTVSSASTKGPSVFPLAPCSRSTSESTAALGCLVKDYFPEPVTVSWNSGALTSGVHTFPAVLQSSGLYSLSSVVTVPSSSLGTKTYTCNVDHKPSNTKVDKRVESKYGPPCPPCPAPEFLGGPSVFLFPPKPKDTLMISRTPEVTCVVVDVSQEDPEVQFNWYVDGVEVHNAKTKPREEQFNSTYRVVSVLTVLHQDWLNGKEYKCKVSNKGLPSSIEKTISKAKGQPREPQVYTLPPSQEEMTKNQVSLTCLVKGFYPSDIAVEWESNGQPENNYKTTPPVLDSDGSFFLYSRLTVDKSRWQEGNVFSCSVMHEALHNHYTQKSLSLSPGK

SEQ ID NO: 1817 - protein, 107 aa, Artificial Sequence; identical to SEQ ID NO: 1807
  source: /note="Description of Artificial Sequence: Synthetic polypeptide"

SEQ ID NO: 1818 - protein, 11 aa, Artificial Sequence
  source: /note="Description of Artificial Sequence: Synthetic peptide"
RASQDVKNAVV

SEQ ID NO: 1819 - protein, 7 aa, Artificial Sequence
  source: /note="Description of Artificial Sequence: Synthetic peptide"
SPSYRYT

SEQ ID NO: 1820 - protein, 9 aa, Artificial Sequence
  source: /note="Description of Artificial Sequence: Synthetic peptide"
QQHYSTPFT

SEQ ID NO: 1821 - protein, 214 aa, Artificial Sequence; identical to SEQ ID NO: 1811
  source: /note="Description of Artificial Sequence: Synthetic polypeptide"

SEQ ID NO: 1822 - protein, 119 aa, Artificial Sequence; identical to SEQ ID NO: 1812
  source: /note="Description of Artificial Sequence: Synthetic polypeptide"

SEQ ID NO: 1823 - protein, 10 aa, Artificial Sequence
  source: /note="Description of Artificial Sequence: Synthetic peptide"
GYTFTEYTLH

SEQ ID NO: 1824 - protein, 10 aa, Artificial Sequence
  source: /note="Description of Artificial Sequence: Synthetic peptide"
GINPNNGGTS

SEQ ID NO: 1825 - protein, 10 aa, Artificial Sequence
  source: /note="Description of Artificial Sequence: Synthetic peptide"
SGYYDYSFAY

SEQ ID NO: 1826 - protein, 446 aa, Artificial Sequence; identical to SEQ ID NO: 1816
  source: /note="Description of Artificial Sequence: Synthetic polypeptide"

SEQ ID NO: 1827 - protein, 107 aa, Artificial Sequence
  source: /note="Description of Artificial Sequence: Synthetic polypeptide"
DIQMTQSPSSLSASVGDRVTITCRASQDVKNAVVWYQQKPGKAPKLLIYSPSYRYTGVPSRFSGSGSGTDFTFTISSVQPEDFATYYCQQHYSTPFTFGQGTKLEIK

SEQ ID NO: 1828 - protein, 11 aa, Artificial Sequence
  source: /note="Description of Artificial Sequence: Synthetic peptide"
RASQDVKNAVV

SEQ ID NO: 1829 - protein, 7 aa, Artificial Sequence
  source: /note="Description of Artificial Sequence: Synthetic peptide"
SPSYRYT

SEQ ID NO: 1830 - protein, 9 aa, Artificial Sequence
  source: /note="Description of Artificial Sequence: Synthetic peptide"
QQHYSTPFT

SEQ ID NO: 1831 - protein, 214 aa, Artificial Sequence
  source: /note="Description of Artificial Sequence: Synthetic polypeptide"
DIQMTQSPSSLSASVGDRVTITCRASQDVKNAVVWYQQKPGKAPKLLIYSPSYRYTGVPSRFSGSGSGTDFTFTISSVQPEDFATYYCQQHYSTPFTFGQGTKLEIKRTVAAPSVFIFPPSDEQLKSGTASVVCLLNNFYPREAKVQWKVDNALQSGNSQESVTEQDSKDSTYSLSSTLTLSKADYEKHKVYACEVTHQGLSSPVTKSFNRGEC

SEQ ID NO: 1832 - protein, 119 aa, Artificial Sequence
  source: /note="Description of Artificial Sequence: Synthetic polypeptide"
QVQLVQSGAEVKKPGASVKISCKTSGYTFTEYTLHWVRQAPGQGLEWIGGINPNNGGTSYAQKFQGRATLTVDTSTSTAYMELSSLRSEDTAVYYCAGSGYYDYSFAYWGQGTLVTVSS

SEQ ID NO: 1833 - protein, 10 aa, Artificial Sequence
  source: /note="Description of Artificial Sequence: Synthetic peptide"
GYTFTEYTLH

SEQ ID NO: 1834 - protein, 10 aa, Artificial Sequence
  source: /note="Description of Artificial Sequence: Synthetic peptide"
GINPNNGGTS

SEQ ID NO: 1835 - protein, 10 aa, Artificial Sequence
  source: /note="Description of Artificial Sequence: Synthetic peptide"
SGYYDYSFAY

SEQ ID NO: 1836 - protein, 446 aa, Artificial Sequence
  source: /note="Description of Artificial Sequence: Synthetic polypeptide"
QVQLVQSGAEVKKPGASVKISCKTSGYTFTEYTLHWVRQAPGQGLEWIGGINPNNGGTSYAQKFQGRATLTVDTSTSTAYMELSSLRSEDTAVYYCAGSGYYDYSFAYWGQGTLVTVSSASTKGPSVFPLAPCSRSTSESTAALGCLVKDYFPEPVTVSWNSGALTSGVHTFPAVLQSSGLYSLSSVVTVPSSSLGTKTYTCNVDHKPSNTKVDKRVESKYGPPCPPCPAPEFLGGPSVFLFPPKPKDTLMISRTPEVTCVVVDVSQEDPEVQFNWYVDGVEVHNAKTKPREEQFNSTYRVVSVLTVLHQDWLNGKEYKCKVSNKGLPSSIEKTISKAKGQPREPQVYTLPPSQEEMTKNQVSLTCLVKGFYPSDIAVEWESNGQPENNYKTTPPVLDSDGSFFLYSRLTVDKSRWQEGNVFSCSVMHEALHNHYTQKSLSLSPGK

SEQ ID NO: 1837 - protein, 107 aa, Artificial Sequence; identical to SEQ ID NO: 1807
  source: /note="Description of Artificial Sequence: Synthetic polypeptide"

SEQ ID NO: 1838 - protein, 11 aa, Artificial Sequence
  source: /note="Description of Artificial Sequence: Synthetic peptide"
RASQDVKNAVV

SEQ ID NO: 1839 - protein, 7 aa, Artificial Sequence
  source: /note="Description of Artificial Sequence: Synthetic peptide"
SPSYRYT

SEQ ID NO: 1840 - protein, 9 aa, Artificial Sequence
  source: /note="Description of Artificial Sequence: Synthetic peptide"
QQHYSTPFT

SEQ ID NO: 1841 - protein, 214 aa, Artificial Sequence; identical to SEQ ID NO: 1811
  source: /note="Description of Artificial Sequence: Synthetic polypeptide"

SEQ ID NO: 1842 - protein, 119 aa, Artificial Sequence; identical to SEQ ID NO: 1832
  source: /note="Description of Artificial Sequence: Synthetic polypeptide"

SEQ ID NO: 1843 - protein, 10 aa, Artificial Sequence
  source: /note="Description of Artificial Sequence: Synthetic peptide"
GYTFTEYTLH

SEQ ID NO: 1844 - protein, 10 aa, Artificial Sequence
  source: /note="Description of Artificial Sequence: Synthetic peptide"
GINPNNGGTS

SEQ ID NO: 1845 - protein, 10 aa, Artificial Sequence
  source: /note="Description of Artificial Sequence: Synthetic peptide"
SGYYDYSFAY

SEQ ID NO: 1846 - protein, 446 aa, Artificial Sequence; identical to SEQ ID NO: 1836
  source: /note="Description of Artificial Sequence: Synthetic polypeptide"

SEQ ID NO: 1847 - protein, 107 aa, Artificial Sequence; identical to SEQ ID NO: 1827
  source: /note="Description of Artificial Sequence: Synthetic polypeptide"

SEQ ID NO: 1848 - protein, 11 aa, Artificial Sequence
  source: /note="Description of Artificial Sequence: Synthetic peptide"
RASQDVKNAVV

SEQ ID NO: 1849 - protein, 7 aa, Artificial Sequence
  source: /note="Description of Artificial Sequence: Synthetic peptide"
SPSYRYT

SEQ ID NO: 1850 - protein, 9 aa, Artificial Sequence
  source: /note="Description of Artificial Sequence: Synthetic peptide"
QQHYSTPFT

SEQ ID NO: 1851 - protein, 214 aa, Artificial Sequence; identical to SEQ ID NO: 1831
  source: /note="Description of Artificial Sequence: Synthetic polypeptide"

SEQ ID NO: 1852 - protein, 119 aa, Artificial Sequence
  source: /note="Description of Artificial Sequence: Synthetic polypeptide"
QVQLVQSGAEVKKPGASVKISCKTSGYTFTEYTLHWVRQAPGQGLEWIGGINPNNGGTSYAQKFQGRATLTVDKSTSTAYMELSSLRSEDTAVYYCAGSGYYDYSFAYWGQGTLVTVSS

SEQ ID NO: 1853 - protein, 10 aa, Artificial Sequence
  source: /note="Description of Artificial Sequence: Synthetic peptide"
GYTFTEYTLH

SEQ ID NO: 1854 - protein, 10 aa, Artificial Sequence
  source: /note="Description of Artificial Sequence: Synthetic peptide"
GINPNNGGTS

SEQ ID NO: 1855 - protein, 10 aa, Artificial Sequence
  source: /note="Description of Artificial Sequence: Synthetic peptide"
SGYYDYSFAY

SEQ ID NO: 1856 - protein, 446 aa, Artificial Sequence
  source: /note="Description of Artificial Sequence: Synthetic polypeptide"
QVQLVQSGAEVKKPGASVKISCKTSGYTFTEYTLHWVRQAPGQGLEWIGGINPNNGGTSYAQKFQGRATLTVDKSTSTAYMELSSLRSEDTAVYYCAGSGYYDYSFAYWGQGTLVTVSSASTKGPSVFPLAPCSRSTSESTAALGCLVKDYFPEPVTVSWNSGALTSGVHTFPAVLQSSGLYSLSSVVTVPSSSLGTKTYTCNVDHKPSNTKVDKRVESKYGPPCPPCPAPEFLGGPSVFLFPPKPKDTLMISRTPEVTCVVVDVSQEDPEVQFNWYVDGVEVHNAKTKPREEQFNSTYRVVSVLTVLHQDWLNGKEYKCKVSNKGLPSSIEKTISKAKGQPREPQVYTLPPSQEEMTKNQVSLTCLVKGFYPSDIAVEWESNGQPENNYKTTPPVLDSDGSFFLYSRLTVDKSRWQEGNVFSCSVMHEALHNHYTQKSLSLSPGK

SEQ ID NO: 1857 - protein, 107 aa, Artificial Sequence; identical to SEQ ID NO: 1807
  source: /note="Description of Artificial Sequence: Synthetic polypeptide"

SEQ ID NO: 1858 - protein, 11 aa, Artificial Sequence
  source: /note="Description of Artificial Sequence: Synthetic peptide"
RASQDVKNAVV

SEQ ID NO: 1859 - protein, 7 aa, Artificial Sequence
  source: /note="Description of Artificial Sequence: Synthetic peptide"
SPSYRYT

SEQ ID NO: 1860 - protein, 9 aa, Artificial Sequence
  source: /note="Description of Artificial Sequence: Synthetic peptide"
QQHYSTPFT

SEQ ID NO: 1861 - protein, 214 aa, Artificial Sequence; identical to SEQ ID NO: 1811
  source: /note="Description of Artificial Sequence: Synthetic polypeptide"

SEQ ID NO: 1862 - protein, 119 aa, Artificial Sequence; identical to SEQ ID NO: 1852
  source: /note="Description of Artificial Sequence: Synthetic polypeptide"

SEQ ID NO: 1863 - protein, 10 aa, Artificial Sequence
  source: /note="Description of Artificial Sequence: Synthetic peptide"
GYTFTEYTLH

SEQ ID NO: 1864 - protein, 10 aa, Artificial Sequence
  source: /note="Description of Artificial Sequence: Synthetic peptide"
GINPNNGGTS

SEQ ID NO: 1865 - protein, 10 aa, Artificial Sequence
  source: /note="Description of Artificial Sequence: Synthetic peptide"
SGYYDYSFAY

SEQ ID NO: 1866 - protein, 446 aa, Artificial Sequence; identical to SEQ ID NO: 1856
  source: /note="Description of Artificial Sequence: Synthetic polypeptide"

SEQ ID NO: 1867 - protein, 107 aa, Artificial Sequence; identical to SEQ ID NO: 1827
  source: /note="Description of Artificial Sequence: Synthetic polypeptide"

SEQ ID NO: 1868 - protein, 11 aa, Artificial Sequence
  source: /note="Description of Artificial Sequence: Synthetic peptide"
RASQDVKNAVV

SEQ ID NO: 1869 - protein, 7 aa, Artificial Sequence
  source: /note="Description of Artificial Sequence: Synthetic peptide"
SPSYRYT

SEQ ID NO: 1870 - protein, 9 aa, Artificial Sequence
  source: /note="Description of Artificial Sequence: Synthetic peptide"
QQHYSTPFT

SEQ ID NO: 1871 - protein, 214 aa, Artificial Sequence; identical to SEQ ID NO: 1831
  source: /note="Description of Artificial Sequence: Synthetic polypeptide"

SEQ ID NO: 1872 - protein, 119 aa, Artificial Sequence
  source: /note="Description of Artificial Sequence: Synthetic polypeptide"
QVQLVQSGAEVKKPGASVKVSCKASGYTFTNYGMNWVRQAPGQGLEWMGWINTYTGEPTYAQKFQGRVTMTRDTSTSTVYMELSSLRSEDTAVYYCARGNGYYVGMDYWGQGTLVTVSS

SEQ ID NO: 1873 - protein, 10 aa, Artificial Sequence
  source: /note="Description of Artificial Sequence: Synthetic peptide"
GYTFTNYGMN

SEQ ID NO: 1874 - protein, 10 aa, Artificial Sequence
  source: /note="Description of Artificial Sequence: Synthetic peptide"
WINTYTGEPT

SEQ ID NO: 1875 - protein, 10 aa, Artificial Sequence
  source: /note="Description of Artificial Sequence: Synthetic peptide"
GNGYYVGMDY

SEQ ID NO: 1876 - protein, 446 aa, Artificial Sequence
  source: /note="Description of Artificial Sequence: Synthetic polypeptide"
QVQLVQSGAEVKKPGASVKVSCKASGYTFTNYGMNWVRQAPGQGLEWMGWINTYTGEPTYAQKFQGRVTMTRDTSTSTVYMELSSLRSEDTAVYYCARGNGYYVGMDYWGQGTLVTVSSASTKGPSVFPLAPCSRSTSESTAALGCLVKDYFPEPVTVSWNSGALTSGVHTFPAVLQSSGLYSLSSVVTVPSSSLGTKTYTCNVDHKPSNTKVDKRVESKYGPPCPPCPAPEFLGGPSVFLFPPKPKDTLMISRTPEVTCVVVDVSQEDPEVQFNWYVDGVEVHNAKTKPREEQFNSTYRVVSVLTVLHQDWLNGKEYKCKVSNKGLPSSIEKTISKAKGQPREPQVYTLPPSQEEMTKNQVSLTCLVKGFYPSDIAVEWESNGQPENNYKTTPPVLDSDGSFFLYSRLTVDKSRWQEGNVFSCSVMHEALHNHYTQKSLSLSPGK

SEQ ID NO: 1877 - protein, 109 aa, Artificial Sequence
  source: /note="Description of Artificial Sequence: Synthetic polypeptide"
QAVVTQEPSLTVSPGGTVTLTCRSSTGAVTTSNHANWFQQKPGQAPRTLIYGTNGRGSWTPARFSGSLLGGKAALTLSGAQPEDEAEYYCALWFSNHWVFGGGTKLTVL

SEQ ID NO: 1878 - protein, 14 aa, Artificial Sequence
  source: /note="Description of Artificial Sequence: Synthetic peptide"
RSSTGAVTTSNHAN

SEQ ID NO: 1879 - protein, 7 aa, Artificial Sequence
  source: /note="Description of Artificial Sequence: Synthetic peptide"
GTNGRGS

SEQ ID NO: 1880 - protein, 9 aa, Artificial Sequence
  source: /note="Description of Artificial Sequence: Synthetic peptide"
ALWFSNHWV

SEQ ID NO: 1881 - protein, 214 aa, Artificial Sequence
  source: /note="Description of Artificial Sequence: Synthetic polypeptide"
QAVVTQEPSLTVSPGGTVTLTCRSSTGAVTTSNHANWFQQKPGQAPRTLIYGTNGRGSWTPARFSGSLLGGKAALTLSGAQPEDEAEYYCALWFSNHWVFGGGTKLTVLQPKAAPSVTLFPPSSEELQANKATLVCLISDFYPGAVTVAWKADSSPVKAGVETTTPSKQSNNKYAASSYLSLTPEQWKSHRSYSCQVTHEGSTVEKTVAPTECS

SEQ ID NO: 1882 - protein, 119 aa, Artificial Sequence
  source: /note="Description of Artificial Sequence: Synthetic polypeptide"
QVQLVQSGAEVKKPGASVKVSCKASGYTFTNYGMNWVRQAPGQGLEWMGWINTYTGEPTYAQKFQGRVTMTLDTSTSTAYMELSSLRSEDTAVYYCSRGNGYYVGMDYWGQGTLVTVSS

SEQ ID NO: 1883 - protein, 10 aa, Artificial Sequence
  source: /note="Description of Artificial Sequence: Synthetic peptide"
GYTFTNYGMN

SEQ ID NO: 1884 - protein, 10 aa, Artificial Sequence
  source: /note="Description of Artificial Sequence: Synthetic peptide"
WINTYTGEPT

SEQ ID NO: 1885 - protein, 10 aa, Artificial Sequence
  source: /note="Description of Artificial Sequence: Synthetic peptide"
GNGYYVGMDY

SEQ ID NO: 1886 - protein, 446 aa, Artificial Sequence
  source: /note="Description of Artificial Sequence: Synthetic polypeptide"
QVQLVQSGAEVKKPGASVKVSCKASGYTFTNYGMNWVRQAPGQGLEWMGWINTYTGEPTYAQKFQGRVTMTLDTSTSTAYMELSSLRSEDTAVYYCSRGNGYYVGMDYWGQGTLVTVSSASTKGPSVFPLAPCSRSTSESTAALGCLVKDYFPEPVTVSWNSGALTSGVHTFPAVLQSSGLYSLSSVVTVPSSSLGTKTYTCNVDHKPSNTKVDKRVESKYGPPCPPCPAPEFLGGPSVFLFPPKPKDTLMISRTPEVTCVVVDVSQEDPEVQFNWYVDGVEVHNAKTKPREEQFNSTYRVVSVLTVLHQDWLNGKEYKCKVSNKGLPSSIEKTISKAKGQPREPQVYTLPPSQEEMTKNQVSLTCLVKGFYPSDIAVEWESNGQPENNYKTTPPVLDSDGSFFLYSRLTVDKSRWQEGNVFSCSVMHEALHNHYTQKSLSLSPGK

SEQ ID NO: 1887 - protein, 109 aa, Artificial Sequence
  source: /note="Description of Artificial Sequence: Synthetic polypeptide"
QAVVTQEPSLTVSPGGTVTLTCGSSTGAVTTSNHANWVQQKPGQAFRGLIRGTNGRGSWTPARFSGSLLGGKAALTISGAQPEDEAEYYCALWFSNHWVFGGGTKLTVL

SEQ ID NO: 1888 - protein, 14 aa, Artificial Sequence
  source: /note="Description of Artificial Sequence: Synthetic peptide"
GSSTGAVTTSNHAN

SEQ ID NO: 1889 - protein, 7 aa, Artificial Sequence
  source: /note="Description of Artificial Sequence: Synthetic peptide"
GTNGRGS

SEQ ID NO: 1890 - protein, 9 aa, Artificial Sequence
  source: /note="Description of Artificial Sequence: Synthetic peptide"
ALWFSNHWV

SEQ ID NO: 1891 - protein, 214 aa, Artificial Sequence
  source: /note="Description of Artificial Sequence: Synthetic polypeptide"
QAVVTQEPSLTVSPGGTVTLTCGSSTGAVTTSNHANWVQQKPGQAFRGLIRGTNGRGSWTPARFSGSLLGGKAALTISGAQPEDEAEYYCALWFSNHWVFGGGTKLTVLQPKAAPSVTLFPPSSEELQANKATLVCLISDFYPGAVTVAWKADSSPVKAGVETTTPSKQSNNKYAASSYLSLTPEQWKSHRSYSCQVTHEGSTVEKTVAPTECS

SEQ ID NO: 1892 - protein, 119 aa, Artificial Sequence; identical to SEQ ID NO: 1882
  source: /note="Description of Artificial Sequence: Synthetic polypeptide"

SEQ ID NO: 1893 - protein, 10 aa, Artificial Sequence
  source: /note="Description of Artificial Sequence: Synthetic peptide"
GYTFTNYGMN

SEQ ID NO: 1894 - protein, 10 aa, Artificial Sequence
  source: /note="Description of Artificial Sequence: Synthetic peptide"
WINTYTGEPT

SEQ ID NO: 1895 - protein, 10 aa, Artificial Sequence
  source: /note="Description of Artificial Sequence: Synthetic peptide"
GNGYYVGMDY

SEQ ID NO: 1896 - protein, 446 aa, Artificial Sequence; identical to SEQ ID NO: 1886
  source: /note="Description of Artificial Sequence: Synthetic polypeptide"

SEQ ID NO: 1897 - protein, 109 aa, Artificial Sequence
  source: /note="Description of Artificial Sequence: Synthetic polypeptide"
QAVVTQEPSLTVSPGGTVTLTCGSSTGAVTTSNHANWVQQKPGQAFRGLIRGTNGRGSGVPARFSGSLLGGKAALTISGAQPEDEAEYYCALWFSNHWVFGGGTKLTVL

SEQ ID NO: 1898 - protein, 14 aa, Artificial Sequence
  source: /note="Description of Artificial Sequence: Synthetic peptide"
GSSTGAVTTSNHAN

SEQ ID NO: 1899 - protein, 7 aa, Artificial Sequence
  source: /note="Description of Artificial Sequence: Synthetic peptide"
GTNGRGS

SEQ ID NO: 1900 - protein, 9 aa, Artificial Sequence
  source: /note="Description of Artificial Sequence: Synthetic peptide"
ALWFSNHWV

SEQ ID NO: 1901 - protein, 214 aa, Artificial Sequence
  source: /note="Description of Artificial Sequence: Synthetic polypeptide"
QAVVTQEPSLTVSPGGTVTLTCGSSTGAVTTSNHANWVQQKPGQAFRGLIRGTNGRGSGVPARFSGSLLGGKAALTISGAQPEDEAEYYCALWFSNHWVFGGGTKLTVLQPKAAPSVTLFPPSSEELQANKATLVCLISDFYPGAVTVAWKADSSPVKAGVETTTPSKQSNNKYAASSYLSLTPEQWKSHRSYSCQVTHEGSTVEKTVAPTECS

SEQ ID NO: 1902 - protein, 119 aa, Artificial Sequence
  source: /note="Description of Artificial Sequence: Synthetic polypeptide"
QVQLVQSGAEVKKPGASVKISCKASGYTFTNYGMNWVRQAPGQGLEWMGWINTYTGEPTYAQKFQGRFTFTLDTSTSTAYLEISSLRSEDTAVYYCSRGNGYYVGMDYWGQGTLVTVSS

SEQ ID NO: 1903 - protein, 10 aa, Artificial Sequence
  source: /note="Description of Artificial Sequence: Synthetic peptide"
GYTFTNYGMN

SEQ ID NO: 1904 - protein, 10 aa, Artificial Sequence
  source: /note="Description of Artificial Sequence: Synthetic peptide"
WINTYTGEPT

SEQ ID NO: 1905 - protein, 10 aa, Artificial Sequence
  source: /note="Description of Artificial Sequence: Synthetic peptide"
GNGYYVGMDY

SEQ ID NO: 1906 - protein, 446 aa, Artificial Sequence
  source: /note="Description of Artificial Sequence: Synthetic polypeptide"
QVQLVQSGAEVKKPGASVKISCKASGYTFTNYGMNWVRQAPGQGLEWMGWINTYTGEPTYAQKFQGRFTFTLDTSTSTAYLEISSLRSEDTAVYYCSRGNGYYVGMDYWGQGTLVTVSSASTKGPSVFPLAPCSRSTSESTAALGCLVKDYFPEPVTVSWNSGALTSGVHTFPAVLQSSGLYSLSSVVTVPSSSLGTKTYTCNVDHKPSNTKVDKRVESKYGPPCPPCPAPEFLGGPSVFLFPPKPKDTLMISRTPEVTCVVVDVSQEDPEVQFNWYVDGVEVHNAKTKPREEQFNSTYRVVSVLTVLHQDWLNGKEYKCKVSNKGLPSSIEKTISKAKGQPREPQVYTLPPSQEEMTKNQVSLTCLVKGFYPSDIAVEWESNGQPENNYKTTPPVLDSDGSFFLYSRLTVDKSRWQEGNVFSCSVMHEALHNHYTQKSLSLSPGK

SEQ ID NO: 1907 - protein, 109 aa, Artificial Sequence; identical to SEQ ID NO: 1887
  source: /note="Description of Artificial Sequence: Synthetic polypeptide"

SEQ ID NO: 1908 - protein, 14 aa, Artificial Sequence
  source: /note="Description of Artificial Sequence: Synthetic peptide"
GSSTGAVTTSNHAN

SEQ ID NO: 1909 - protein, 7 aa, Artificial Sequence
  source: /note="Description of Artificial Sequence: Synthetic peptide"
GTNGRGS

SEQ ID NO: 1910 - protein, 9 aa, Artificial Sequence
  source: /note="Description of Artificial Sequence: Synthetic peptide"
ALWFSNHWV

SEQ ID NO: 1911 - protein, 214 aa, Artificial Sequence; identical to SEQ ID NO: 1891
  source: /note="Description of Artificial Sequence: Synthetic polypeptide"

SEQ ID NO: 1912 - protein, 119 aa, Artificial Sequence; identical to SEQ ID NO: 1902
  source: /note="Description of Artificial Sequence: Synthetic polypeptide"

SEQ ID NO: 1913 - protein, 10 aa, Artificial Sequence
  source: /note="Description of Artificial Sequence: Synthetic peptide"
GYTFTNYGMN

SEQ ID NO: 1914 - protein, 10 aa, Artificial Sequence
  source: /note="Description of Artificial Sequence: Synthetic peptide"
WINTYTGEPT

SEQ ID NO: 1915 - protein, 10 aa, Artificial Sequence
  source: /note="Description of Artificial Sequence: Synthetic peptide"
GNGYYVGMDY

SEQ ID NO: 1916 - protein, 446 aa, Artificial Sequence; identical to SEQ ID NO: 1906
  source: /note="Description of Artificial Sequence: Synthetic polypeptide"

SEQ ID NO: 1917 - protein, 109 aa, Artificial Sequence; identical to SEQ ID NO: 1897
  source: /note="Description of Artificial Sequence: Synthetic polypeptide"

SEQ ID NO: 1918 - protein, 14 aa, Artificial Sequence
  source: /note="Description of Artificial Sequence: Synthetic peptide"
GSSTGAVTTSNHAN

SEQ ID NO: 1919 - protein, 7 aa, Artificial Sequence
  source: /note="Description of Artificial Sequence: Synthetic peptide"
GTNGRGS

SEQ ID NO: 1920 - protein, 9 aa, Artificial Sequence
  source: /note="Description of Artificial Sequence: Synthetic peptide"
ALWFSNHWV

SEQ ID NO: 1921 - protein, 214 aa, Artificial Sequence; identical to SEQ ID NO: 1901
  source: /note="Description of Artificial Sequence: Synthetic polypeptide"

SEQ ID NO: 1922 - protein, 119 aa, Artificial Sequence
  source: /note="Description of Artificial Sequence: Synthetic polypeptide"
QVQLVQSGAEVKKPGASVKISCKASGYTFTNYGMNWVRQAPGQGLEWMGWINTYTGEPTYAQKFQGRFTFTLDASTSTAYLEISSLRSEDTAVYYCSRGNGYYVGMDYWGQGTLVTVSS

SEQ ID NO: 1923 - protein, 10 aa, Artificial Sequence
  source: /note="Description of Artificial Sequence: Synthetic peptide"
GYTFTNYGMN

SEQ ID NO: 1924 - protein, 10 aa, Artificial Sequence
  source: /note="Description of Artificial Sequence: Synthetic peptide"
WINTYTGEPT

SEQ ID NO: 1925 - protein, 10 aa, Artificial Sequence
  source: /note="Description of Artificial Sequence: Synthetic peptide"
GNGYYVGMDY

SEQ ID NO: 1926 - protein, 446 aa, Artificial Sequence; identical to SEQ ID NO: 1906
  source: /note="Description of Artificial Sequence: Synthetic polypeptide"

SEQ ID NO: 1927 - protein, 109 aa, Artificial Sequence; identical to SEQ ID NO: 1887
  source: /note="Description of Artificial Sequence: Synthetic polypeptide"

SEQ ID NO: 1928 - protein, 14 aa, Artificial Sequence
  source: /note="Description of Artificial Sequence: Synthetic peptide"
GSSTGAVTTSNHAN

SEQ ID NO: 1929 - protein, 7 aa, Artificial Sequence
  source: /note="Description of Artificial Sequence: Synthetic peptide"
GTNGRGS

SEQ ID NO: 1930 - protein, 9 aa, Artificial Sequence
  source: /note="Description of Artificial Sequence: Synthetic peptide"
ALWFSNHWV

SEQ ID NO: 1931 - protein, 214 aa, Artificial Sequence; identical to SEQ ID NO: 1891
  source: /note="Description of Artificial Sequence: Synthetic polypeptide"

SEQ ID NO: 1932 - protein, 119 aa, Artificial Sequence; identical to SEQ ID NO: 1922
  source: /note="Description of Artificial Sequence: Synthetic polypeptide"

SEQ ID NO: 1933 - protein, 10 aa, Artificial Sequence
  source: /note="Description of Artificial Sequence: Synthetic peptide"
GYTFTNYGMN

SEQ ID NO: 1934 - protein, 10 aa, Artificial Sequence
  source: /note="Description of Artificial Sequence: Synthetic peptide"
WINTYTGEPT

SEQ ID NO: 1935 - protein, 10 aa, Artificial Sequence
  source: /note="Description of Artificial Sequence: Synthetic peptide"
GNGYYVGMDY

SEQ ID NO: 1936 - protein, 446 aa, Artificial Sequence
  source: /note="Description of Artificial Sequence: Synthetic polypeptide"
QVQLVQSGAEVKKPGASVKISCKASGYTFTNYGMNWVRQAPGQGLEWMGWINTYTGEPTYAQKFQGRFTFTLDASTSTAYLEISSLRSEDTAVYYCSRGNGYYVGMDYWGQGTLVTVSSASTKGPSVFPLAPCSRSTSESTAALGCLVKDYFPEPVTVSWNSGALTSGVHTFPAVLQSSGLYSLSSVVTVPSSSLGTKTYTCNVDHKPSNTKVDKRVESKYGPPCPPCPAPEFLGGPSVFLFPPKPKDTLMISRTPEVTCVVVDVSQEDPEVQFNWYVDGVEVHNAKTKPREEQFNSTYRVVSVLTVLHQDWLNGKEYKCKVSNKGLPSSIEKTISKAKGQPREPQVYTLPPSQEEMTKNQVSLTCLVKGFYPSDIAVEWESNGQPENNYKTTPPVLDSDGSFFLYSRLTVDKSRWQEGNVFSCSVMHEALHNHYTQKSLSLSPGK

SEQ ID NO: 1937 - protein, 109 aa, Artificial Sequence; identical to SEQ ID NO: 1897
  source: /note="Description of Artificial Sequence: Synthetic polypeptide"

SEQ ID NO: 1938 - protein, 14 aa, Artificial Sequence
  source: /note="Description of Artificial Sequence: Synthetic peptide"
GSSTGAVTTSNHAN

SEQ ID NO: 1939 - protein, 7 aa, Artificial Sequence
  source: /note="Description of Artificial Sequence: Synthetic peptide"
GTNGRGS

SEQ ID NO: 1940 - protein, 9 aa, Artificial Sequence
  source: /note="Description of Artificial Sequence: Synthetic peptide"
ALWFSNHWV

SEQ ID NO: 1941 - protein, 214 aa, Artificial Sequence; identical to SEQ ID NO: 1901
  source: /note="Description of Artificial Sequence: Synthetic polypeptide"

SEQ ID NO: 1942 - protein, 119 aa, Artificial Sequence
  source: /note="Description of Artificial Sequence: Synthetic polypeptide"
EVQLVESGGGLVQPGGSLRLSCAASGFTFSSYIMSWVRQAPGKGLEWVSTISGGGTNTYYADSVKGRFTISRDNSKNTLYLQMNSLRAEDTAVYYCARWLLSYYAMDYWGQGTLVTVSS

SEQ ID NO: 1943 - protein, 10 aa, Artificial Sequence
  source: /note="Description of Artificial Sequence: Synthetic peptide"
GFTFSSYIMS

SEQ ID NO: 1944 - protein, 10 aa, Artificial Sequence
  source: /note="Description of Artificial Sequence: Synthetic peptide"
TISGGGTNTY

SEQ ID NO: 1945 - protein, 10 aa, Artificial Sequence
  source: /note="Description of Artificial Sequence: Synthetic peptide"
WLLSYYAMDY

SEQ ID NO: 1946 - protein, 446 aa, Artificial Sequence
  source: /note="Description of Artificial Sequence: Synthetic polypeptide"
EVQLVESGGGLVQPGGSLRLSCAASGFTFSSYIMSWVRQAPGKGLEWVSTISGGGTNTYYADSVKGRFTISRDNSKNTLYLQMNSLRAEDTAVYYCARWLLSYYAMDYWGQGTLVTVSSASTKGPSVFPLAPCSRSTSESTAALGCLVKDYFPEPVTVSWNSGALTSGVHTFPAVLQSSGLYSLSSVVTVPSSSLGTKTYTCNVDHKPSNTKVDKRVESKYGPPCPPCPAPEFLGGPSVFLFPPKPKDTLMISRTPEVTCVVVDVSQEDPEVQFNWYVDGVEVHNAKTKPREEQFNSTYRVVSVLTVLHQDWLNGKEYKCKVSNKGLPSSIEKTISKAKGQPREPQVYTLPPSQEEMTKNQVSLTCLVKGFYPSDIAVEWESNGQPENNYKTTPPVLDSDGSFFLYSRLTVDKSRWQEGNVFSCSVMHEALHNHYTQKSLSLSPGK

SEQ ID NO: 1947 - protein, 107 aa, Artificial Sequence
  source: /note="Description of Artificial Sequence: Synthetic polypeptide"
DIQMTQSPSSLSASVGDRVTITCRASQNINVWLTWYQQKPGKAPKLLIYKASNLHTGVPSRFSGSGSGTDFTLTISSLQPEDFATYYCQQGQSYPYTFGQGTKLEIK

SEQ ID NO: 1948 - protein, 11 aa, Artificial Sequence
  source: /note="Description of Artificial Sequence: Synthetic peptide"
RASQNINVWLT

SEQ ID NO: 1949 - protein, 7 aa, Artificial Sequence
  source: /note="Description of Artificial Sequence: Synthetic peptide"
KASNLHT

SEQ ID NO: 1950 - protein, 9 aa, Artificial Sequence
  source: /note="Description of Artificial Sequence: Synthetic peptide"
QQGQSYPYT

SEQ ID NO: 1951 - protein, 214 aa, Artificial Sequence
  source: /note="Description of Artificial Sequence: Synthetic polypeptide"
DIQMTQSPSSLSASVGDRVTITCRASQNINVWLTWYQQKPGKAPKLLIYKASNLHTGVPSRFSGSGSGTDFTLTISSLQPEDFATYYCQQGQSYPYTFGQGTKLEIKRTVAAPSVFIFPPSDEQLKSGTASVVCLLNNFYPREAKVQWKVDNALQSGNSQESVTEQDSKDSTYSLSSTLTLSKADYEKHKVYACEVTHQGLSSPVTKSFNRGEC

SEQ ID NO: 1952 - protein, 119 aa, Artificial Sequence
  source: /note="Description of Artificial Sequence: Synthetic polypeptide"
EVQLVESGGGLVQPGGSLRLSCAASGFTFSSYIMSWVRQAPGKGLEWVSTISGGGTNTYYADSVKGRFTISRDNSKNTLYLQMNSLRAEDTAVYYCAKWLLSYYAMDYWGQGTLVTVSS

SEQ ID NO: 1953 - protein, 10 aa, Artificial Sequence
  source: /note="Description of Artificial Sequence: Synthetic peptide"
GFTFSSYIMS

SEQ ID NO: 1954 - protein, 10 aa, Artificial Sequence
  source: /note="Description of Artificial Sequence: Synthetic peptide"
TISGGGTNTY

SEQ ID NO: 1955 - protein, 10 aa, Artificial Sequence
  source: /note="Description of Artificial Sequence: Synthetic peptide"
WLLSYYAMDY

SEQ ID NO: 1956 - protein, 446 aa, Artificial Sequence
  source: /note="Description of Artificial Sequence: Synthetic polypeptide"
EVQLVESGGGLVQPGGSLRLSCAASGFTFSSYIMSWVRQAPGKGLEWVSTISGGGTNTYYADSVKGRFTISRDNSKNTLYLQMNSLRAEDTAVYYCAKWLLSYYAMDYWGQGTLVTVSSASTKGPSVFPLAPCSRSTSESTAALGCLVKDYFPEPVTVSWNSGALTSGVHTFPAVLQSSGLYSLSSVVTVPSSSLGTKTYTCNVDHKPSNTKVDKRVESKYGPPCPPCPAPEFLGGPSVFLFPPKPKDTLMISRTPEVTCVVVDVSQEDPEVQFNWYVDGVEVHNAKTKPREEQFNSTYRVVSVLTVLHQDWLNGKEYKCKVSNKGLPSSIEKTISKAKGQPREPQVYTLPPSQEEMTKNQVSLTCLVKGFYPSDIAVEWESNGQPENNYKTTPPVLDSDGSFFLYSRLTVDKSRWQEGNVFSCSVMHEALHNHYTQKSLSLSPGK

SEQ ID NO: 1957 - protein, 107 aa, Artificial Sequence; identical to SEQ ID NO: 1947
  source: /note="Description of Artificial Sequence: Synthetic polypeptide"

SEQ ID NO: 1958 - protein, 11 aa, Artificial Sequence
  source: /note="Description of Artificial Sequence: Synthetic peptide"
RASQNINVWLT

SEQ ID NO: 1959 - protein, 7 aa, Artificial Sequence
  source: /note="Description of Artificial Sequence: Synthetic peptide"
KASNLHT

SEQ ID NO: 1960 - protein, 9 aa, Artificial Sequence
  source: /note="Description of Artificial Sequence: Synthetic peptide"
QQGQSYPYT

SEQ ID NO: 1961 - protein, 214 aa, Artificial Sequence; identical to SEQ ID NO: 1951
  source: /note="Description of Artificial Sequence: Synthetic polypeptide"

SEQ ID NO: 1962 - protein, 119 aa, Artificial Sequence; identical to SEQ ID NO: 1654
  source: /note="Description of Artificial Sequence: Synthetic polypeptide"

SEQ ID NO: 1963 - protein, 10 aa, Artificial Sequence
  source: /note="Description of Artificial Sequence: Synthetic peptide"
GFTFSSYIMS

SEQ ID NO: 1964 - protein, 10 aa, Artificial Sequence
  source: /note="Description of Artificial Sequence: Synthetic peptide"
TISGGGTNTY

SEQ ID NO: 1965 - protein, 10 aa, Artificial Sequence
  source: /note="Description of Artificial Sequence: Synthetic peptide"
WLLSYYAMDY

SEQ ID NO: 1966 - protein, 446 aa, Artificial Sequence; identical to SEQ ID NO: 1658
  source: /note="Description of Artificial Sequence: Synthetic polypeptide"

SEQ ID NO: 1967 - protein, 107 aa, Artificial Sequence; identical to SEQ ID NO: 1947
  source: /note="Description of Artificial Sequence: Synthetic polypeptide"

SEQ ID NO: 1968 - protein, 11 aa, Artificial Sequence
  source: /note="Description of Artificial Sequence: Synthetic peptide"
RASQNINVWLT

SEQ ID NO: 1969 - protein, 7 aa, Artificial Sequence
  source: /note="Description of Artificial Sequence: Synthetic peptide"
KASNLHT

SEQ ID NO: 1970 - protein, 9 aa, Artificial Sequence
  source: /note="Description of Artificial Sequence: Synthetic peptide"
QQGQSYPYT

SEQ ID NO: 1971 - protein, 214 aa, Artificial Sequence; identical to SEQ ID NO: 1951
  source: /note="Description of Artificial Sequence: Synthetic polypeptide"

SEQ ID NO: 1972 - protein, 119 aa, Artificial Sequence; identical to SEQ ID NO: 1952
  source: /note="Description of Artificial Sequence: Synthetic polypeptide"

SEQ ID NO: 1973 - protein, 10 aa, Artificial Sequence
  source: /note="Description of Artificial Sequence: Synthetic peptide"
GFTFSSYIMS

SEQ ID NO: 1974 - protein, 10 aa, Artificial Sequence
  source: /note="Description of Artificial Sequence: Synthetic peptide"
TISGGGTNTY

SEQ ID NO: 1975 - protein, 10 aa, Artificial Sequence
  source: /note="Description of Artificial Sequence: Synthetic peptide"
WLLSYYAMDY

SEQ ID NO: 1976 - protein, 446 aa, Artificial Sequence; identical to SEQ ID NO: 1956
  source: /note="Description of Artificial Sequence: Synthetic polypeptide"

SEQ ID NO: 1977 - protein, 107 aa, Artificial Sequence
  source: /note="Description of Artificial Sequence: Synthetic polypeptide"
DIQMTQSPSSLSASVGDRITITCRASQNINVWLTWYQQKPGKAPKLLIYKASNLHTGVPSRFSGSGSGTDFTLTISSLQPEDFATYYCQQGQSYPYTFGQGTKLEIK

SEQ ID NO: 1978 - protein, 11 aa, Artificial Sequence
  source: /note="Description of Artificial Sequence: Synthetic peptide"
RASQNINVWLT

SEQ ID NO: 1979 - protein, 7 aa, Artificial Sequence
  source: /note="Description of Artificial Sequence: Synthetic peptide"
KASNLHT

SEQ ID NO: 1980 - protein, 9 aa, Artificial Sequence
  source: /note="Description of Artificial Sequence: Synthetic peptide"
QQGQSYPYT

SEQ ID NO: 1981 - protein, 214 aa, Artificial Sequence
  source: /note="Description of Artificial Sequence: Synthetic polypeptide"
DIQMTQSPSSLSASVGDRITITCRASQNINVWLTWYQQKPGKAPKLLIYKASNLHTGVPSRFSGSGSGTDFTLTISSLQPEDFATYYCQQGQSYPYTFGQGTKLEIKRTVAAPSVFIFPPSDEQLKSGTASVVCLLNNFYPREAKVQWKVDNALQSGNSQESVTEQDSKDSTYSLSSTLTLSKADYEKHKVYACEVTHQGLSSPVTKSFNRGEC

SEQ ID NO: 1982 - protein, 119 aa, Artificial Sequence; identical to SEQ ID NO: 1654
  source: /note="Description of Artificial Sequence: Synthetic polypeptide"

SEQ ID NO: 1983 - protein, 10 aa, Artificial Sequence
  source: /note="Description of Artificial Sequence: Synthetic peptide"
GFTFSSYIMS

SEQ ID NO: 1984 - protein, 10 aa, Artificial Sequence
  source: /note="Description of Artificial Sequence: Synthetic peptide"
TISGGGTNTY

SEQ ID NO: 1985 - protein, 10 aa, Artificial Sequence
  source: /note="Description of Artificial Sequence: Synthetic peptide"
WLLSYYAMDY

SEQ ID NO: 1986 - protein, 446 aa, Artificial Sequence; identical to SEQ ID NO: 1658
  source: /note="Description of Artificial Sequence: Synthetic polypeptide"

SEQ ID NO: 1987 - protein, 107 aa, Artificial Sequence; identical to SEQ ID NO: 1977
  source: /note="Description of Artificial Sequence: Synthetic polypeptide"

SEQ ID NO: 1988 - protein, 11 aa, Artificial Sequence
  source: /note="Description of Artificial Sequence: Synthetic peptide"
RASQNINVWLT

SEQ ID NO: 1989 - protein, 7 aa, Artificial Sequence
  source: /note="Description of Artificial Sequence: Synthetic peptide"
KASNLHT

SEQ ID NO: 1990 - protein, 9 aa, Artificial Sequence
  source: /note="Description of Artificial Sequence: Synthetic peptide"
QQGQSYPYT

SEQ ID NO: 1991 - protein, 214 aa, Artificial Sequence; identical to SEQ ID NO: 1981
  source: /note="Description of Artificial Sequence: Synthetic polypeptide"

SEQ ID NO: 1992 - protein, 119 aa, Artificial Sequence; identical to SEQ ID NO: 1952
  source: /note="Description of Artificial Sequence: Synthetic polypeptide"

SEQ ID NO: 1993 - protein, 10 aa, Artificial Sequence
  source: /note="Description of Artificial Sequence: Synthetic peptide"
GFTFSSYIMS

SEQ ID NO: 1994 - protein, 10 aa, Artificial Sequence
  source: /note="Description of Artificial Sequence: Synthetic peptide"
TISGGGTNTY

SEQ ID NO: 1995 - protein, 10 aa, Artificial Sequence
  source: /note="Description of Artificial Sequence: Synthetic peptide"
WLLSYYAMDY

SEQ ID NO: 1996 - protein, 446 aa, Artificial Sequence; identical to SEQ ID NO: 1956
  source: /note="Description of Artificial Sequence: Synthetic polypeptide"

SEQ ID NO: 1997 - protein, 107 aa, Artificial Sequence
  source: /note="Description of Artificial Sequence: Synthetic polypeptide"
DIQMTQSPSSLSASVGDRVTITCRASQNINVWLTWYQQKPGKAPKLLIYKASKSHTGVPSRFSGSGSGTDFTLTISSLQPEDFATYYCQQGQSYPYTFGQGTKLEIK

SEQ ID NO: 1998 - protein, 11 aa, Artificial Sequence
  source: /note="Description of Artificial Sequence: Synthetic peptide"
RASQNINVWLT

SEQ ID NO: 1999 - protein, 7 aa, Artificial Sequence
  source: /note="Description of Artificial Sequence: Synthetic peptide"
KASKSHT

SEQ ID NO: 2000 - protein, 9 aa, Artificial Sequence
  source: /note="Description of Artificial Sequence: Synthetic peptide"
QQGQSYPYT

SEQ ID NO: 2001 - protein, 214 aa, Artificial Sequence
  source: /note="Description of Artificial Sequence: Synthetic polypeptide"
DIQMTQSPSSLSASVGDRVTITCRASQNINVWLTWYQQKPGKAPKLLIYKASKSHTGVPSRFSGSGSGTDFTLTISSLQPEDFATYYCQQGQSYPYTFGQGTKLEIKRTVAAPSVFIFPPSDEQLKSGTASVVCLLNNFYPREAKVQWKVDNALQSGNSQESVTEQDSKDSTYSLSSTLTLSKADYEKHKVYACEVTHQGLSSPVTKSFNRGEC

SEQ ID NO: 2002 - protein, 119 aa, Artificial Sequence; identical to SEQ ID NO: 1654
  source: /note="Description of Artificial Sequence: Synthetic polypeptide"

SEQ ID NO: 2003 - protein, 10 aa, Artificial Sequence
  source: /note="Description of Artificial Sequence: Synthetic peptide"
GFTFSSYIMS

SEQ ID NO: 2004 - protein, 10 aa, Artificial Sequence
  source: /note="Description of Artificial Sequence: Synthetic peptide"
TISGGGTNTY

SEQ ID NO: 2005 - protein, 10 aa, Artificial Sequence
  source: /note="Description of Artificial Sequence: Synthetic peptide"
WLLSYYAMDY

SEQ ID NO: 2006 - protein, 446 aa, Artificial Sequence; identical to SEQ ID NO: 1658
  source: /note="Description of Artificial Sequence: Synthetic polypeptide"

SEQ ID NO: 2007 - protein, 107 aa, Artificial Sequence; identical to SEQ ID NO: 1997
  source: /note="Description of Artificial Sequence: Synthetic polypeptide"

SEQ ID NO: 2008 - protein, 11 aa, Artificial Sequence
  source: /note="Description of Artificial Sequence: Synthetic peptide"
RASQNINVWLT

SEQ ID NO: 2009 - protein, 7 aa, Artificial Sequence
  source: /note="Description of Artificial Sequence: Synthetic peptide"
KASKSHT

SEQ ID NO: 2010 - protein, 9 aa, Artificial Sequence
  source: /note="Description of Artificial Sequence: Synthetic peptide"
QQGQSYPYT

SEQ ID NO: 2011 - protein, 214 aa, Artificial Sequence; identical to SEQ ID NO: 2001
  source: /note="Description of Artificial Sequence: Synthetic polypeptide"

SEQ ID NO: 2012 - protein, 119 aa, Artificial Sequence; identical to SEQ ID NO: 1952
  source: /note="Description of Artificial Sequence: Synthetic polypeptide"

SEQ ID NO: 2013 - protein, 10 aa, Artificial Sequence
  source: /note="Description of Artificial Sequence: Synthetic peptide"
GFTFSSYIMS

SEQ ID NO: 2014 - protein, 10 aa, Artificial Sequence
  source: /note="Description of Artificial Sequence: Synthetic peptide"
TISGGGTNTY

SEQ ID NO: 2015 - protein, 10 aa, Artificial Sequence
  source: /note="Description of Artificial Sequence: Synthetic peptide"
WLLSYYAMDY

SEQ ID NO: 2016 - protein, 446 aa, Artificial Sequence; identical to SEQ ID NO: 1956
  source: /note="Description of Artificial Sequence: Synthetic polypeptide"

SEQ ID NO: 2017 - protein, 107 aa, Artificial Sequence
  source: /note="Description of Artificial Sequence: Synthetic polypeptide"
DIQMTQSPSSLSASVGDRITITCRASQNINVWLTWYQQKPGKAPKLLIYKASKSHTGVPSRFSGSGSGTDFTLTISSLQPEDFATYYCQQGQSYPYTFGQGTKLEIK

SEQ ID NO: 2018 - protein, 11 aa, Artificial Sequence
  source: /note="Description of Artificial Sequence: Synthetic peptide"
RASQNINVWLT

SEQ ID NO: 2019 - protein, 7 aa, Artificial Sequence
  source: /note="Description of Artificial Sequence: Synthetic peptide"
KASKSHT

SEQ ID NO: 2020 - protein, 9 aa, Artificial Sequence
  source: /note="Description of Artificial Sequence: Synthetic peptide"
QQGQSYPYT

SEQ ID NO: 2021 - protein, 214 aa, Artificial Sequence
  source: /note="Description of Artificial Sequence: Synthetic polypeptide"
DIQMTQSPSSLSASVGDRITITCRASQNINVWLTWYQQKPGKAPKLLIYKASKSHTGVPSRFSGSGSGTDFTLTISSLQPEDFATYYCQQGQSYPYTFGQGTKLEIKRTVAAPSVFIFPPSDEQLKSGTASVVCLLNNFYPREAKVQWKVDNALQSGNSQESVTEQDSKDSTYSLSSTLTLSKADYEKHKVYACEVTHQGLSSPVTKSFNRGEC

SEQ ID NO: 2022 - protein, 119 aa, Artificial Sequence; identical to SEQ ID NO: 1654
  source: /note="Description of Artificial Sequence: Synthetic polypeptide"

SEQ ID NO: 2023 - protein, 10 aa, Artificial Sequence
  source: /note="Description of Artificial Sequence: Synthetic peptide"
GFTFSSYIMS

SEQ ID NO: 2024 - protein, 10 aa, Artificial Sequence
  source: /note="Description of Artificial Sequence: Synthetic peptide"
TISGGGTNTY

SEQ ID NO: 2025 - protein, 10 aa, Artificial Sequence
  source: /note="Description of Artificial Sequence: Synthetic peptide"
WLLSYYAMDY

SEQ ID NO: 2026 - protein, 446 aa, Artificial Sequence; identical to SEQ ID NO: 1658
  source: /note="Description of Artificial Sequence: Synthetic polypeptide"

SEQ ID NO: 2027 - protein, 107 aa, Artificial Sequence; identical to SEQ ID NO: 2017
  source: /note="Description of Artificial Sequence: Synthetic polypeptide"

SEQ ID NO: 2028 - protein, 11 aa, Artificial Sequence
  source: /note="Description of Artificial Sequence: Synthetic peptide"
RASQNINVWLT

SEQ ID NO: 2029 - protein, 7 aa, Artificial Sequence
  source: /note="Description of Artificial Sequence: Synthetic peptide"
KASKSHT

SEQ ID NO: 2030 - protein, 9 aa, Artificial Sequence
  source: /note="Description of Artificial Sequence: Synthetic peptide"
QQGQSYPYT

SEQ ID NO: 2031 - protein, 214 aa, Artificial Sequence; identical to SEQ ID NO: 2021
  source: /note="Description of Artificial Sequence: Synthetic polypeptide"

SEQ ID NO: 2032 - protein, 119 aa, Artificial Sequence
  source: /note="Description of Artificial Sequence: Synthetic polypeptide"
QVQLVQSGAEVKKPGASVKVSCKASGYTITNYGMNWVRQAPGQGLEWMGWINTYTGEPTYAQKFQGRVTMTRDTSTSTVYMELSSLRSEDTAVYYCARGNGNPLGMDYWGQGTLVTVSS

SEQ ID NO: 2033 - protein, 10 aa, Artificial Sequence
  source: /note="Description of Artificial Sequence: Synthetic peptide"
GYTITNYGMN

SEQ ID NO: 2034 - protein, 10 aa, Artificial Sequence
  source: /note="Description of Artificial Sequence: Synthetic peptide"
WINTYTGEPT

SEQ ID NO: 2035 - protein, 10 aa, Artificial Sequence
  source: /note="Description of Artificial Sequence: Synthetic peptide"
GNGNPLGMDY

SEQ ID NO: 2036 - protein, 446 aa, Artificial Sequence
  source: /note="Description of Artificial Sequence: Synthetic polypeptide"
QVQLVQSGAEVKKPGASVKVSCKASGYTITNYGMNWVRQAPGQGLEWMGWINTYTGEPTYAQKFQGRVTMTRDTSTSTVYMELSSLRSEDTAVYYCARGNGNPLGMDYWGQGTLVTVSSASTKGPSVFPLAPCSRSTSESTAALGCLVKDYFPEPVTVSWNSGALTSGVHTFPAVLQSSGLYSLSSVVTVPSSSLGTKTYTCNVDHKPSNTKVDKRVESKYGPPCPPCPAPEFLGGPSVFLFPPKPKDTLMISRTPEVTCVVVDVSQEDPEVQFNWYVDGVEVHNAKTKPREEQFNSTYRVVSVLTVLHQDWLNGKEYKCKVSNKGLPSSIEKTISKAKGQPREPQVYTLPPSQEEMTKNQVSLTCLVKGFYPSDIAVEWESNGQPENNYKTTPPVLDSDGSFFLYSRLTVDKSRWQEGNVFSCSVMHEALHNHYTQKSLSLSPGK

SEQ ID NO: 2037 - protein, 106 aa, Artificial Sequence
  source: /note="Description of Artificial Sequence: Synthetic polypeptide"
EIVLTQSPATLSLSPGERATLSCGNGNPLGMDYWYQQKPGQAPRLLIYDTSKLASGIPARFSGSGSGTDFTLTISSLEPEDFAVYYCFQGSGYPLTFGQGTKLEIK

SEQ ID NO: 2038 - protein, 10 aa, Artificial Sequence
  source: /note="Description of Artificial Sequence: Synthetic peptide"
GNGNPLGMDY

SEQ ID NO: 2039 - protein, 7 aa, Artificial Sequence
  source: /note="Description of Artificial Sequence: Synthetic peptide"
DTSKLAS

SEQ ID NO: 2040 - protein, 9 aa, Artificial Sequence
  source: /note="Description of Artificial Sequence: Synthetic peptide"
FQGSGYPLT

SEQ ID NO: 2041 - protein, 213 aa, Artificial Sequence
  source: /note="Description of Artificial Sequence: Synthetic polypeptide"
EIVLTQSPATLSLSPGERATLSCGNGNPLGMDYWYQQKPGQAPRLLIYDTSKLASGIPARFSGSGSGTDFTLTISSLEPEDFAVYYCFQGSGYPLTFGQGTKLEIKRTVAAPSVFIFPPSDEQLKSGTASVVCLLNNFYPREAKVQWKVDNALQSGNSQESVTEQDSKDSTYSLSSTLTLSKADYEKHKVYACEVTHQGLSSPVTKSFNRGEC

SEQ ID NO: 2042 - protein, 119 aa, Artificial Sequence
  source: /note="Description of Artificial Sequence: Synthetic polypeptide"
QVQLVQSGAEVKKPGASVKVSCKASGYTITNYGMNWVRQAPGQGLEWMGWINTYTGEPTYAQKFQGRFTMTLDTSTSTVYMELSSLRSEDTAVYYCARGNGNPLGMDYWGQGTLVTVSS

SEQ ID NO: 2043 - protein, 10 aa, Artificial Sequence
  source: /note="Description of Artificial Sequence: Synthetic peptide"
GYTITNYGMN

SEQ ID NO: 2044 - protein, 10 aa, Artificial Sequence
  source: /note="Description of Artificial Sequence: Synthetic peptide"
WINTYTGEPT

SEQ ID NO: 2045 - protein, 10 aa, Artificial Sequence
  source: /note="Description of Artificial Sequence: Synthetic peptide"
GNGNPLGMDY

SEQ ID NO: 2046 - protein, 446 aa, Artificial Sequence
  source: /note="Description of Artificial Sequence: Synthetic polypeptide"
QVQLVQSGAEVKKPGASVKVSCKASGYTITNYGMNWVRQAPGQGLEWMGWINTYTGEPTYAQKFQGRFTMTLDTSTSTVYMELSSLRSEDTAVYYCARGNGNPLGMDYWGQGTLVTVSSASTKGPSVFPLAPCSRSTSESTAALGCLVKDYFPEPVTVSWNSGALTSGVHTFPAVLQSSGLYSLSSVVTVPSSSLGTKTYTCNVDHKPSNTKVDKRVESKYGPPCPPCPAPEFLGGPSVFLFPPKPKDTLMISRTPEVTCVVVDVSQEDPEVQFNWYVDGVEVHNAKTKPREEQFNSTYRVVSVLTVLHQDWLNGKEYKCKVSNKGLPSSIEKTISKAKGQPREPQVYTLPPSQEEMTKNQVSLTCLVKGFYPSDIAVEWESNGQPENNYKTTPPVLDSDGSFFLYSRLTVDKSRWQEGNVFSCSVMHEALHNHYTQKSLSLSPGK

SEQ ID NO: 2047 - protein, 106 aa, Artificial Sequence
  source: /note="Description of Artificial Sequence: Synthetic polypeptide"
EIVLTQSPATLSLSPGERATLSCGNGNPLGMDYWYQQKPGQAPRLLIYDTSKLASGIPARFSGSGSGTDYTLTISSLEPEDFAVYYCFQGSGYPLTFGQGTKLEIK

SEQ ID NO: 2048 - protein, 10 aa, Artificial Sequence
  source: /note="Description of Artificial Sequence: Synthetic peptide"
GNGNPLGMDY

SEQ ID NO: 2049 - protein, 7 aa, Artificial Sequence
  source: /note="Description of Artificial Sequence: Synthetic peptide"
DTSKLAS

SEQ ID NO: 2050 - protein, 9 aa, Artificial Sequence
  source: /note="Description of Artificial Sequence: Synthetic peptide"
FQGSGYPLT

SEQ ID NO: 2051 - protein, 213 aa, Artificial Sequence
  source: /note="Description of Artificial Sequence: Synthetic polypeptide"
EIVLTQSPATLSLSPGERATLSCGNGNPLGMDYWYQQKPGQAPRLLIYDTSKLASGIPARFSGSGSGTDYTLTISSLEPEDFAVYYCFQGSGYPLTFGQGTKLEIKRTVAAPSVFIFPPSDEQLKSGTASVVCLLNNFYPREAKVQWKVDNALQSGNSQESVTEQDSKDSTYSLSSTLTLSKADYEKHKVYACEVTHQGLSSPVTKSFNRGEC

SEQ ID NO: 2052 - protein, 119 aa, Artificial Sequence; identical to SEQ ID NO: 2042
  source: /note="Description of Artificial Sequence: Synthetic polypeptide"

SEQ ID NO: 2053 - protein, 10 aa, Artificial Sequence
  source: /note="Description of Artificial Sequence: Synthetic peptide"
GYTITNYGMN

SEQ ID NO: 2054 - protein, 10 aa, Artificial Sequence
  source: /note="Description of Artificial Sequence: Synthetic peptide"
WINTYTGEPT

SEQ ID NO: 2055 - protein, 10 aa, Artificial Sequence
  source: /note="Description of Artificial Sequence: Synthetic peptide"
GNGNPLGMDY

SEQ ID NO: 2056 - protein, 446 aa, Artificial Sequence; identical to SEQ ID NO: 2046
  source: /note="Description of Artificial Sequence: Synthetic polypeptide"

SEQ ID NO: 2057 - protein, 106 aa, Artificial Sequence
  source: /note="Description of Artificial Sequence: Synthetic polypeptide"
EIVLTQSPATLSLSPGERATLSCGNGNPLGMDYWYQQKPGQAPRLWIYDTSKLASGVPARFSGSGSGTDYTLTISSLEPEDFAVYYCFQGSGYPLTFGQGTKLEIK

SEQ ID NO: 2058 - protein, 10 aa, Artificial Sequence
  source: /note="Description of Artificial Sequence: Synthetic peptide"
GNGNPLGMDY

SEQ ID NO: 2059 - protein, 7 aa, Artificial Sequence
  source: /note="Description of Artificial Sequence: Synthetic peptide"
DTSKLAS

SEQ ID NO: 2060 - protein, 9 aa, Artificial Sequence
  source: /note="Description of Artificial Sequence: Synthetic peptide"
FQGSGYPLT

SEQ ID NO: 2061 - protein, 213 aa, Artificial Sequence
  source: /note="Description of Artificial Sequence: Synthetic polypeptide"
EIVLTQSPATLSLSPGERATLSCGNGNPLGMDYWYQQKPGQAPRLWIYDTSKLASGVPARFSGSGSGTDYTLTISSLEPEDFAVYYCFQGSGYPLTFGQGTKLEIKRTVAAPSVFIFPPSDEQLKSGTASVVCLLNNFYPREAKVQWKVDNALQSGNSQESVTEQDSKDSTYSLSSTLTLSKADYEKHKVYACEVTHQGLSSPVTKSFNRGEC

SEQ ID NO: 2062 - protein, 119 aa, Artificial Sequence; identical to SEQ ID NO: 2042
  source: /note="Description of Artificial Sequence: Synthetic polypeptide"

SEQ ID NO: 2063 - protein, 10 aa, Artificial Sequence
  source: /note="Description of Artificial Sequence: Synthetic peptide"
GYTITNYGMN

SEQ ID NO: 2064 - protein, 10 aa, Artificial Sequence
  source: /note="Description of Artificial Sequence: Synthetic peptide"
WINTYTGEPT

SEQ ID NO: 2065 - protein, 10 aa, Artificial Sequence
  source: /note="Description of Artificial Sequence: Synthetic peptide"
GNGNPLGMDY

SEQ ID NO: 2066 - protein, 446 aa, Artificial Sequence; identical to SEQ ID NO: 2046
  source: /note="Description of Artificial Sequence: Synthetic polypeptide"

SEQ ID NO: 2067 - protein, 106 aa, Artificial Sequence
  source: /note="Description of Artificial Sequence: Synthetic polypeptide"
EIVLTQSPATLSLSPGERVTMSCGNGNPLGMDYWYQQKPGQAPRLWIYDTSKLASGVPARFSGSGSGTDYTLTISSMEPEDFAVYYCFQGSGYPLTFGQGTKLEIK

SEQ ID NO: 2068 - protein, 10 aa, Artificial Sequence
  source: /note="Description of Artificial Sequence: Synthetic peptide"
GNGNPLGMDY

SEQ ID NO: 2069 - protein, 7 aa, Artificial Sequence
  source: /note="Description of Artificial Sequence: Synthetic peptide"
DTSKLAS

SEQ ID NO: 2070 - protein, 9 aa, Artificial Sequence
  source: /note="Description of Artificial Sequence: Synthetic peptide"
FQGSGYPLT

SEQ ID NO: 2071 - protein, 213 aa, Artificial Sequence
  source: /note="Description of Artificial Sequence: Synthetic polypeptide"
EIVLTQSPATLSLSPGERVTMSCGNGNPLGMDYWYQQKPGQAPRLWIYDTSKLASGVPARFSGSGSGTDYTLTISSMEPEDFAVYYCFQGSGYPLTFGQGTKLEIKRTVAAPSVFIFPPSDEQLKSGTASVVCLLNNFYPREAKVQWKVDNALQSGNSQESVTEQDSKDSTYSLSSTLTLSKADYEKHKVYACEVTHQGLSSPVTKSFNRGEC

SEQ ID NO: 2072 - protein, 119 aa, Artificial Sequence
  source: /note="Description of Artificial Sequence: Synthetic polypeptide"
QVQLVQSGAEVKKPGASVKISCKASGYTITNYGMNWVRQAPGQGLEWMGWINTYTGEPTYAQKFQGRFTITLDTSTSTVYLEISSLRSEDTAVYYCARGNGNPLGMDYWGQGTLVTVSS

SEQ ID NO: 2073 - protein, 10 aa, Artificial Sequence
  source: /note="Description of Artificial Sequence: Synthetic peptide"
GYTITNYGMN

SEQ ID NO: 2074 - protein, 10 aa, Artificial Sequence
  source: /note="Description of Artificial Sequence: Synthetic peptide"
WINTYTGEPT

SEQ ID NO: 2075 - protein, 10 aa, Artificial Sequence
  source: /note="Description of Artificial Sequence: Synthetic peptide"
GNGNPLGMDY

SEQ ID NO: 2076 - protein, 446 aa, Artificial Sequence
  source: /note="Description of Artificial Sequence: Synthetic polypeptide"
QVQLVQSGAEVKKPGASVKISCKASGYTITNYGMNWVRQAPGQGLEWMGWINTYTGEPTYAQKFQGRFTITLDTSTSTVYLEISSLRSEDTAVYYCARGNGNPLGMDYWGQGTLVTVSSASTKGPSVFPLAPCSRSTSESTAALGCLVKDYFPEPVTVSWNSGALTSGVHTFPAVLQSSGLYSLSSVVTVPSSSLGTKTYTCNVDHKPSNTKVDKRVESKYGPPCPPCPAPEFLGGPSVFLFPPKPKDTLMISRTPEVTCVVVDVSQEDPEVQFNWYVDGVEVHNAKTKPREEQFNSTYRVVSVLTVLHQDWLNGKEYKCKVSNKGLPSSIEKTISKAKGQPREPQVYTLPPSQEEMTKNQVSLTCLVKGFYPSDIAVEWESNGQPENNYKTTPPVLDSDGSFFLYSRLTVDKSRWQEGNVFSCSVMHEALHNHYTQKSLSLSPGK

SEQ ID NO: 2077 - protein, 106 aa, Artificial Sequence; identical to SEQ ID NO: 2047
  source: /note="Description of Artificial Sequence: Synthetic polypeptide"

SEQ ID NO: 2078 - protein, 10 aa, Artificial Sequence
  source: /note="Description of Artificial Sequence: Synthetic peptide"
GNGNPLGMDY

SEQ ID NO: 2079 - protein, 7 aa, Artificial Sequence
  source: /note="Description of Artificial Sequence: Synthetic peptide"
DTSKLAS

SEQ ID NO: 2080 - protein, 9 aa, Artificial Sequence
  source: /note="Description of Artificial Sequence: Synthetic peptide"
FQGSGYPLT

SEQ ID NO: 2081 - protein, 213 aa, Artificial Sequence; identical to SEQ ID NO: 2051
  source: /note="Description of Artificial Sequence: Synthetic polypeptide"

SEQ ID NO: 2082 - protein, 119 aa, Artificial Sequence; identical to SEQ ID NO: 2072
  source: /note="Description of Artificial Sequence: Synthetic polypeptide"

SEQ ID NO: 2083 - protein, 10 aa, Artificial Sequence
  source: /note="Description of Artificial Sequence: Synthetic peptide"
GYTITNYGMN

SEQ ID NO: 2084 - protein, 10 aa, Artificial Sequence
  source: /note="Description of Artificial Sequence: Synthetic peptide"
WINTYTGEPT

SEQ ID NO: 2085 - protein, 10 aa, Artificial Sequence
  source: /note="Description of Artificial Sequence: Synthetic peptide"
GNGNPLGMDY

SEQ ID NO: 2086 - protein, 446 aa, Artificial Sequence; identical to SEQ ID NO: 2076
  source: /note="Description of Artificial Sequence: Synthetic polypeptide"

SEQ ID NO: 2087 - protein, 106 aa, Artificial Sequence; identical to SEQ ID NO: 2057
  source: /note="Description of Artificial Sequence: Synthetic polypeptide"

SEQ ID NO: 2088 - protein, 10 aa, Artificial Sequence
  source: /note="Description of Artificial Sequence: Synthetic peptide"
GNGNPLGMDY

SEQ ID NO: 2089 - protein, 7 aa, Artificial Sequence
  source: /note="Description of Artificial Sequence: Synthetic peptide"
DTSKLAS

SEQ ID NO: 2090 - protein, 9 aa, Artificial Sequence
  source: /note="Description of Artificial Sequence: Synthetic peptide"
FQGSGYPLT

SEQ ID NO: 2091 - protein, 213 aa, Artificial Sequence; identical to SEQ ID NO: 2061
  source: /note="Description of Artificial Sequence: Synthetic polypeptide"

SEQ ID NO: 2092 - protein, 119 aa, Artificial Sequence; identical to SEQ ID NO: 2072
  source: /note="Description of Artificial Sequence: Synthetic polypeptide"

SEQ ID NO: 2093 - protein, 10 aa, Artificial Sequence
  source: /note="Description of Artificial Sequence: Synthetic peptide"
GYTITNYGMN

SEQ ID NO: 2094 - protein, 10 aa, Artificial Sequence
  source: /note="Description of Artificial Sequence: Synthetic peptide"
WINTYTGEPT

SEQ ID NO: 2095 - protein, 10 aa, Artificial Sequence
  source: /note="Description of Artificial Sequence: Synthetic peptide"
GNGNPLGMDY

SEQ ID NO: 2096 - protein, 446 aa, Artificial Sequence; identical to SEQ ID NO: 2076
  source: /note="Description of Artificial Sequence: Synthetic polypeptide"

SEQ ID NO: 2097 - protein, 106 aa, Artificial Sequence; identical to SEQ ID NO: 2067
  source: /note="Description of Artificial Sequence: Synthetic polypeptide"

SEQ ID NO: 2098 - protein, 10 aa, Artificial Sequence
  source: /note="Description of Artificial Sequence: Synthetic peptide"
GNGNPLGMDY

SEQ ID NO: 2099 - protein, 7 aa, Artificial Sequence
  source: /note="Description of Artificial Sequence: Synthetic peptide"
DTSKLAS

SEQ ID NO: 2100 - protein, 9 aa, Artificial Sequence
  source: /note="Description of Artificial Sequence: Synthetic peptide"
FQGSGYPLT

SEQ ID NO: 2101 - protein, 213 aa, Artificial Sequence; identical to SEQ ID NO: 2071
  source: /note="Description of Artificial Sequence: Synthetic polypeptide"

SEQ ID NO: 2102 - protein, 119 aa, Artificial Sequence; identical to SEQ ID NO: 1952
  source: /note="Description of Artificial Sequence: Synthetic polypeptide"

SEQ ID NO: 2103 - protein, 10 aa, Artificial Sequence
  source: /note="Description of Artificial Sequence: Synthetic peptide"
GFTFSSYIMS

SEQ ID NO: 2104 - protein, 10 aa, Artificial Sequence
  source: /note="Description of Artificial Sequence: Synthetic peptide"
TISGGGTNTY

SEQ ID NO: 2105 - protein, 10 aa, Artificial Sequence
  source: /note="Description of Artificial Sequence: Synthetic peptide"
WLLSYYAMDY

SEQ ID NO: 2106 - protein, 446 aa, Artificial Sequence; identical to SEQ ID NO: 1956
  source: /note="Description of Artificial Sequence: Synthetic polypeptide"

SEQ ID NO: 2107 - protein, 107 aa, Artificial Sequence
  source: /note="Description of Artificial Sequence: Synthetic polypeptide"
DIQMTQSPSSLSASVGDRVTITCRASQNINVWLSWYQQKPGKAPKLLIYKASKSHTGVPSRFSGSGSGTDFTLTISSLQPEDFATYYCQQGQSYPYTFGQGTKLEIK

SEQ ID NO: 2108 - protein, 11 aa, Artificial Sequence
  source: /note="Description of Artificial Sequence: Synthetic peptide"
RASQNINVWLS

SEQ ID NO: 2109 - protein, 7 aa, Artificial Sequence
  source: /note="Description of Artificial Sequence: Synthetic peptide"
KASKSHT

SEQ ID NO: 2110 - protein, 9 aa, Artificial Sequence
  source: /note="Description of Artificial Sequence: Synthetic peptide"
QQGQSYPYT

SEQ ID NO: 2111 - protein, 214 aa, Artificial Sequence
  source: /note="Description of Artificial Sequence: Synthetic polypeptide"
DIQMTQSPSSLSASVGDRVTITCRASQNINVWLSWYQQKPGKAPKLLIYKASKSHTGVPSRFSGSGSGTDFTLTISSLQPEDFATYYCQQGQSYPYTFGQGTKLEIKRTVAAPSVFIFPPSDEQLKSGTASVVCLLNNFYPREAKVQWKVDNALQSGNSQESVTEQDSKDSTYSLSSTLTLSKADYEKHKVYACEVTHQGLSSPVTKSFNRGEC

SEQ ID NO: 2112 - protein, 119 aa, Artificial Sequence; identical to SEQ ID NO: 1952
  source: /note="Description of Artificial Sequence: Synthetic polypeptide"

SEQ ID NO: 2113 - protein, 10 aa, Artificial Sequence
  source: /note="Description of Artificial Sequence: Synthetic peptide"
GFTFSSYIMS

SEQ ID NO: 2114 - protein, 10 aa, Artificial Sequence
  source: /note="Description of Artificial Sequence: Synthetic peptide"
TISGGGTNTY

SEQ ID NO: 2115 - protein, 10 aa, Artificial Sequence
  source: /note="Description of Artificial Sequence: Synthetic peptide"
WLLSYYAMDY

SEQ ID NO: 2116 - protein, 446 aa, Artificial Sequence; identical to SEQ ID NO: 1956
  source: /note="Description of Artificial Sequence: Synthetic polypeptide"

SEQ ID NO: 2117 - protein, 107 aa, Artificial Sequence; identical to SEQ ID NO: 1659
  source: /note="Description of Artificial Sequence: Synthetic polypeptide"

SEQ ID NO: 2118 - protein, 11 aa, Artificial Sequence
  source: /note="Description of Artificial Sequence: Synthetic peptide"
RASQNINVWLS

SEQ ID NO: 2119 - protein, 7 aa, Artificial Sequence
  source: /note="Description of Artificial Sequence: Synthetic peptide"
KASKSHT

SEQ ID NO: 2120 - protein, 9 aa, Artificial Sequence
  source: /note="Description of Artificial Sequence: Synthetic peptide"
QQGQSYPYT

SEQ ID NO: 2121 - protein, 214 aa, Artificial Sequence; identical to SEQ ID NO: 1663
  source: /note="Description of Artificial Sequence: Synthetic polypeptide"

SEQ ID NO: 2122 - protein, 119 aa, Artificial Sequence; identical to SEQ ID NO: 1654
  source: /note="Description of Artificial Sequence: Synthetic polypeptide"

SEQ ID NO: 2123 - protein, 10 aa, Artificial Sequence
  source: /note="Description of Artificial Sequence: Synthetic peptide"
GFTFSSYIMS

SEQ ID NO: 2124 - protein, 10 aa, Artificial Sequence
  source: /note="Description of Artificial Sequence: Synthetic peptide"
TISGGGTNTY

SEQ ID NO: 2125 - protein, 10 aa, Artificial Sequence
  source: /note="Description of Artificial Sequence: Synthetic peptide"
WLLSYYAMDY

SEQ ID NO: 2126 - protein, 446 aa, Artificial Sequence; identical to SEQ ID NO: 1658
  source: /note="Description of Artificial Sequence: Synthetic polypeptide"

SEQ ID NO: 2127 - protein, 107 aa, Artificial Sequence; identical to SEQ ID NO: 2107
  source: /note="Description of Artificial Sequence: Synthetic polypeptide"

SEQ ID NO: 2128 - protein, 11 aa, Artificial Sequence
  source: /note="Description of Artificial Sequence: Synthetic peptide"
RASQNINVWLS

SEQ ID NO: 2129 - protein, 7 aa, Artificial Sequence
  source: /note="Description of Artificial Sequence: Synthetic peptide"
KASKSHT

SEQ ID NO: 2130 - protein, 9 aa, Artificial Sequence
  source: /note="Description of Artificial Sequence: Synthetic peptide"
QQGQSYPYT

SEQ ID NO: 2131 - protein, 214 aa, Artificial Sequence; identical to SEQ ID NO: 2111
  source: /note="Description of Artificial Sequence: Synthetic polypeptide"

SEQ ID NO: 2132 - protein, 119 aa, Artificial Sequence; identical to SEQ ID NO: 1654
  source: /note="Description of Artificial Sequence: Synthetic polypeptide"

SEQ ID NO: 2133 - protein, 10 aa, Artificial Sequence
  source: /note="Description of Artificial Sequence: Synthetic peptide"
GFTFSSYIMS

SEQ ID NO: 2134 - protein, 10 aa, Artificial Sequence
  source: /note="Description of Artificial Sequence: Synthetic peptide"
TISGGGTNTY

SEQ ID NO: 2135 - protein, 10 aa, Artificial Sequence
  source: /note="Description of Artificial Sequence: Synthetic peptide"
WLLSYYAMDY

SEQ ID NO: 2136 - protein, 446 aa, Artificial Sequence; identical to SEQ ID NO: 1658
  source: /note="Description of Artificial Sequence: Synthetic polypeptide"

SEQ ID NO: 2137 - protein, 107 aa, Artificial Sequence; identical to SEQ ID NO: 1659
  source: /note="Description of Artificial Sequence: Synthetic polypeptide"

SEQ ID NO: 2138 - protein, 11 aa, Artificial Sequence
  source: /note="Description of Artificial Sequence: Synthetic peptide"
RASQNINVWLS

SEQ ID NO: 2139 - protein, 7 aa, Artificial Sequence
  source: /note="Description of Artificial Sequence: Synthetic peptide"
KASKSHT

SEQ ID NO: 2140 - protein, 9 aa, Artificial Sequence
  source: /note="Description of Artificial Sequence: Synthetic peptide"
QQGQSYPYT

SEQ ID NO: 2141 - protein, 214 aa, Artificial Sequence; identical to SEQ ID NO: 1663
  source: /note="Description of Artificial Sequence: Synthetic polypeptide"

SEQ ID NO: 2142 - protein, 117 aa, Artificial Sequence
  source: /note="Description of Artificial Sequence: Synthetic polypeptide"
EVQLQQSGPELVKPGASMKISCKASGYSFTGYTMNWVRQSHGKNLEWLGLIFPYNGGTSYNQNFKGKATLTVDTSSSTAYMELLSLTSVDSAVYYCARGVRFALDYWGQGTSVSVSS

SEQ ID NO: 2143 - protein, 10 aa, Artificial Sequence
  source: /note="Description of Artificial Sequence: Synthetic peptide"
GYSFTGYTMN

SEQ ID NO: 2144 - protein, 10 aa, Artificial Sequence
  source: /note="Description of Artificial Sequence: Synthetic peptide"
LIFPYNGGTS

SEQ ID NO: 2145 - protein, 8 aa, Artificial Sequence
  source: /note="Description of Artificial Sequence: Synthetic peptide"
GVRFALDY

SEQ ID NO: 2146 - protein, 112 aa, Artificial Sequence
  source: /note="Description of Artificial Sequence: Synthetic polypeptide"
DVVMTQTPLSLPVSFGDQVSISCRSSQSLANSYGNTYLSWYLHKPGQSPQLLIYEISNRFSGVPDRFSGSGSGTDFTLNISTIKPEDLGMYYCLQGTHQPWTFGGGTKLEIK

SEQ ID NO: 2147 - protein, 16 aa, Artificial Sequence
  source: /note="Description of Artificial Sequence: Synthetic peptide"
RSSQSLANSYGNTYLS

SEQ ID NO: 2148 - protein, 7 aa, Artificial Sequence
  source: /note="Description of Artificial Sequence: Synthetic peptide"
EISNRFS

SEQ ID NO: 2149 - protein, 9 aa, Artificial Sequence
  source: /note="Description of Artificial Sequence: Synthetic peptide"
LQGTHQPWT

SEQ ID NO: 2150 - protein, 119 aa, Artificial Sequence; identical to SEQ ID NO: 1782
  source: /note="Description of Artificial Sequence: Synthetic polypeptide"

SEQ ID NO: 2151 - protein, 8 aa, Artificial Sequence
  source: /note="Description of Artificial Sequence: Synthetic peptide"
GYTFSSYV

SEQ ID NO: 2152 - protein, 8 aa, Artificial Sequence
  source: /note="Description of Artificial Sequence: Synthetic peptide"
IDPYNDGA

SEQ ID NO: 2153 - protein, 12 aa, Artificial Sequence
  source: /note="Description of Artificial Sequence: Synthetic peptide"
ARGGPYGWYFDV

SEQ ID NO: 2154 - protein, 443 aa, Artificial Sequence
  source: /note="Description of Artificial Sequence: Synthetic polypeptide"
EVQLQQSGPELVKPGSSVKMSCKASGYTFSSYVMHWVKQKPGQGLEWIGYIDPYNDGAKYNEKFKGKATLTSDKSSSTAYMELSSLTSEDSAVYYCARGGPYGWYFDVWGAGTTVTVSSAKTTPPSVYPLAPGSAAQTNSMVTLGCLVKGYFPEPVTVTWNSGSLSSGVHTFPAVLQSDLYTLSSSVTVPSSTWPSETVTCNVAHPASSTKVDKKIVPRDCGCKPCICTVPEVSSVFIFPPKPKDVLTITLTPKVTCVVVDISKDDPEVQFSWFVDDVEVHTAQTQPREEQFNSTFRSVSELPIMHQDWLNGKEFKCRVNSAAFPAPIEKTISKTKGRPKAPQVYTIPPPKEQMAKDKVSLTCMITDFFPEDITVEWQWNGQPAENYKNTQPIMDTDGSYFVYSKLNVQKSNWEAGNTFTCSVLHEGLHNHHTEKSLSHSPGK

SEQ ID NO: 2155 - protein, 107 aa, Artificial Sequence; identical to SEQ ID NO: 1787
  source: /note="Description of Artificial Sequence: Synthetic polypeptide"

SEQ ID NO: 2156 - protein, 6 aa, Artificial Sequence
  source: /note="Description of Artificial Sequence: Synthetic peptide"
EHIYSY

SEQ ID NO: 2157 - protein, 3 aa, Artificial Sequence
  source: /note="Description of Artificial Sequence: Synthetic peptide"
NAK

SEQ ID NO: 2158 - protein, 9 aa, Artificial Sequence
  source: /note="Description of Artificial Sequence: Synthetic peptide"
QHHFGSPLT

SEQ ID NO: 2159 - protein, 214 aa, Artificial Sequence
  source: /note="Description of Artificial Sequence: Synthetic polypeptide"
DIQMTQSPASLSASVGETVTITCRASEHIYSYLSWYQQKQGKSPQLLVYNAKTLAEGVPSRFSGSGSGTQFSLKINSLQPEDFGTYYCQHHFGSPLTFGAGTTLELKRADAAPTVSIFPPSSEQLTSGGASVVCFLNNFYPKDINVKWKIDGSERQNGVLNSWTDQDSKDSTYSMSSTLTLTKDEYERHNSYTCEATHKTSTSPIVKSFNRNEC

SEQ ID NO: 2160 - protein, 130 aa, Artificial Sequence; identical to SEQ ID NO: 1792
  source: /note="Description of Artificial Sequence: Synthetic polypeptide"

SEQ ID NO: 2161 - protein, 10 aa, Artificial Sequence
  source: /note="Description of Artificial Sequence: Synthetic peptide"
GGSVSSGIYY

SEQ ID NO: 2162 - protein, 7 aa, Artificial Sequence
  source: /note="Description of Artificial Sequence: Synthetic peptide"
IYYSGST

SEQ ID NO: 2163 - protein, 22 aa, Artificial Sequence
  source: /note="Description of Artificial Sequence: Synthetic peptide"
ARDYYVSGNYYNVDYYFFGVDV

SEQ ID NO: 2164 - protein, 454 aa, Artificial Sequence
  source: /note="Description of Artificial Sequence: Synthetic polypeptide"
QVHLQESGPGLVKPSETLSLTCTVSGGSVSSGIYYWSWIRQPPGKGLEWIGYIYYSGSTNYNPSLKSRVTISVDTSKNQFSLKLSSVTAADTAVYYCARDYYVSGNYYNVDYYFFGVDVWGQGTTVTVSSAKTTPPSVYPLAPGSAAQTNSMVTLGCLVKGYFPEPVTVTWNSGSLSSGVHTFPAVLQSDLYTLSSSVTVPSSTWPSETVTCNVAHPASSTKVDKKIVPRDCGCKPCICTVPEVSSVFIFPPKPKDVLTITLTPKVTCVVVDISKDDPEVQFSWFVDDVEVHTAQTQPREEQFNSTFRSVSELPIMHQDWLNGKEFKCRVNSAAFPAPIEKTISKTKGRPKAPQVYTIPPPKEQMAKDKVSLTCMITDFFPEDITVEWQWNGQPAENYKNTQPIMDTDGSYFVYSKLNVQKSNWEAGNTFTCSVLHEGLHNHHTEKSLSHSPGK

SEQ ID NO: 2165 - protein, 109 aa, Artificial Sequence; identical to SEQ ID NO: 1797
  source: /note="Description of Artificial Sequence: Synthetic polypeptide"

SEQ ID NO: 2166 - protein, 6 aa, Artificial Sequence
  source: /note="Description of Artificial Sequence: Synthetic peptide"
QSVSSY

SEQ ID NO: 2167 - protein, 3 aa, Artificial Sequence
  source: /note="Description of Artificial Sequence: Synthetic peptide"
DAS

SEQ ID NO: 2168 - protein, 11 aa, Artificial Sequence
  source: /note="Description of Artificial Sequence: Synthetic peptide"
QQRSNWPPLFT

SEQ ID NO: 2169 - protein, 216 aa, Artificial Sequence
  source: /note="Description of Artificial Sequence: Synthetic polypeptide"
EIVLTQSPATLSLSPGERATLSCRASQSVSSYLAWYQQKPGQAPRLLIYDASNRATGIPARFSGSGSGTDFTLTISSLEPEDFAVYYCQQRSNWPPLFTFGPGTKVDIKRADAAPTVSIFPPSSEQLTSGGASVVCFLNNFYPKDINVKWKIDGSERQNGVLNSWTDQDSKDSTYSMSSTLTLTKDEYERHNSYTCEATHKTSTSPIVKSFNRNEC

SEQ ID NO: 2170 - protein, 119 aa, Artificial Sequence; identical to SEQ ID NO: 2042
  source: /note="Description of Artificial Sequence: Synthetic polypeptide"

SEQ ID NO: 2171 - protein, 10 aa, Artificial Sequence
  source: /note="Description of Artificial Sequence: Synthetic peptide"
GYTITNYGMN

SEQ ID NO: 2172 - protein, 10 aa, Artificial Sequence
  source: /note="Description of Artificial Sequence: Synthetic peptide"
WINTYTGEPT

SEQ ID NO: 2173 - protein, 10 aa, Artificial Sequence
  source: /note="Description of Artificial Sequence: Synthetic peptide"
GNGNPLGMDY

SEQ ID NO: 2174 - protein, 446 aa, Artificial Sequence; identical to SEQ ID NO: 2046
  source: /note="Description of Artificial Sequence: Synthetic polypeptide"

SEQ ID NO: 2175 - protein, 106 aa, Artificial Sequence; identical to SEQ ID NO: 2047
  source: /note="Description of Artificial Sequence: Synthetic polypeptide"

SEQ ID NO: 2176 - protein, 10 aa, Artificial Sequence
  source: /note="Description of Artificial Sequence: Synthetic peptide"
GNGNPLGMDY

SEQ ID NO: 2177 - protein, 7 aa, Artificial Sequence
  source: /note="Description of Artificial Sequence: Synthetic peptide"
DTSKLAS

SEQ ID NO: 2178 - protein, 9 aa, Artificial Sequence
  source: /note="Description of Artificial Sequence: Synthetic peptide"
FQGSGYPLT

SEQ ID NO: 2179 - protein, 213 aa, Artificial Sequence; identical to SEQ ID NO: 2051
  source: /note="Description of Artificial Sequence: Synthetic polypeptide"

SEQ ID NO: 2180 - protein, 119 aa, Artificial Sequence; identical to SEQ ID NO: 2042
  source: /note="Description of Artificial Sequence: Synthetic polypeptide"

SEQ ID NO: 2181 - protein, 10 aa, Artificial Sequence
  source: /note="Description of Artificial Sequence: Synthetic peptide"
GYTITNYGMN

SEQ ID NO: 2182 - protein, 10 aa, Artificial Sequence
  source: /note="Description of Artificial Sequence: Synthetic peptide"
WINTYTGEPT

SEQ ID NO: 2183 - protein, 10 aa, Artificial Sequence
  source: /note="Description of Artificial Sequence: Synthetic peptide"
GNGNPLGMDY

SEQ ID NO: 2184 - protein, 446 aa, Artificial Sequence; identical to SEQ ID NO: 2046
  source: /note="Description of Artificial Sequence: Synthetic polypeptide"

SEQ ID NO: 2185 - protein, 106 aa, Artificial Sequence; identical to SEQ ID NO: 2057
  source: /note="Description of Artificial Sequence: Synthetic polypeptide"

SEQ ID NO: 2186 - protein, 10 aa, Artificial Sequence
  source: /note="Description of Artificial Sequence: Synthetic peptide"
GNGNPLGMDY

SEQ ID NO: 2187 - protein, 7 aa, Artificial Sequence
  source: /note="Description of Artificial Sequence: Synthetic peptide"
DTSKLAS

SEQ ID NO: 2188 - protein, 9 aa, Artificial Sequence
  source: /note="Description of Artificial Sequence: Synthetic peptide"
FQGSGYPLT

SEQ ID NO: 2189 - protein, 213 aa, Artificial Sequence; identical to SEQ ID NO: 2061
  source: /note="Description of Artificial Sequence: Synthetic polypeptide"

SEQ ID NO: 2190 - protein, 119 aa, Artificial Sequence; identical to SEQ ID NO: 2042
  source: /note="Description of Artificial Sequence: Synthetic polypeptide"

SEQ ID NO: 2191 - protein, 10 aa, Artificial Sequence
  source: /note="Description of Artificial Sequence: Synthetic peptide"
GYTITNYGMN

SEQ ID NO: 2192 - protein, 10 aa, Artificial Sequence
  source: /note="Description of Artificial Sequence: Synthetic peptide"
WINTYTGEPT

SEQ ID NO: 2193 - protein, 10 aa, Artificial Sequence
  source: /note="Description of Artificial Sequence: Synthetic peptide"
GNGNPLGMDY

SEQ ID NO: 2194 - protein, 446 aa, Artificial Sequence; identical to SEQ ID NO: 2046
  source: /note="Description of Artificial Sequence: Synthetic polypeptide"

SEQ ID NO: 2195 - protein, 106 aa, Artificial Sequence; identical to SEQ ID NO: 2067
  source: /note="Description of Artificial Sequence: Synthetic polypeptide"

SEQ ID NO: 2196 - protein, 10 aa, Artificial Sequence
  source: /note="Description of Artificial Sequence: Synthetic peptide"
GNGNPLGMDY

SEQ ID NO: 2197 - protein, 7 aa, Artificial Sequence
  source: /note="Description of Artificial Sequence: Synthetic peptide"
DTSKLAS

SEQ ID NO: 2198 - protein, 9 aa, Artificial Sequence
  source: /note="Description of Artificial Sequence: Synthetic peptide"
FQGSGYPLT

SEQ ID NO: 2199 - protein, 213 aa, Artificial Sequence; identical to SEQ ID NO: 2071
  source: /note="Description of Artificial Sequence: Synthetic polypeptide"

SEQ ID NO: 2200 - protein, 119 aa, Artificial Sequence; identical to SEQ ID NO: 2072
  source: /note="Description of Artificial Sequence: Synthetic polypeptide"

SEQ ID NO: 2201 - protein, 10 aa, Artificial Sequence
  source: /note="Description of Artificial Sequence: Synthetic peptide"
GYTITNYGMN

SEQ ID NO: 2202 - protein, 10 aa, Artificial Sequence
  source: /note="Description of Artificial Sequence: Synthetic peptide"
WINTYTGEPT

SEQ ID NO: 2203 - protein, 10 aa, Artificial Sequence
  source: /note="Description of Artificial Sequence: Synthetic peptide"
GNGNPLGMDY

SEQ ID NO: 2204 - protein, 446 aa, Artificial Sequence; identical to SEQ ID NO: 2076
  source: /note="Description of Artificial Sequence: Synthetic polypeptide"

SEQ ID NO: 2205 - protein, 106 aa, Artificial Sequence; identical to SEQ ID NO: 2047
  source: /note="Description of Artificial Sequence: Synthetic polypeptide"

SEQ ID NO: 2206 - protein, 10 aa, Artificial Sequence
  source: /note="Description of Artificial Sequence: Synthetic peptide"
GNGNPLGMDY

SEQ ID NO: 2207 - protein, 7 aa, Artificial Sequence
  source: /note="Description of Artificial Sequence: Synthetic peptide"
DTSKLAS

SEQ ID NO: 2208 - protein, 9 aa, Artificial Sequence
  source: /note="Description of Artificial Sequence: Synthetic peptide"
FQGSGYPLT

SEQ ID NO: 2209 - protein, 213 aa, Artificial Sequence; identical to SEQ ID NO: 2051
  source: /note="Description of Artificial Sequence: Synthetic polypeptide"

SEQ ID NO: 2210 - protein, 119 aa, Artificial Sequence; identical to SEQ ID NO: 2072
  source: /note="Description of Artificial Sequence: Synthetic polypeptide"

SEQ ID NO: 2211 - protein, 10 aa, Artificial Sequence
  source: /note="Description of Artificial Sequence: Synthetic peptide"
GYTITNYGMN

SEQ ID NO: 2212 - protein, 10 aa, Artificial Sequence
  source: /note="Description of Artificial Sequence: Synthetic peptide"
WINTYTGEPT

SEQ ID NO: 2213 - protein, 10 aa, Artificial Sequence
  source: /note="Description of Artificial Sequence: Synthetic peptide"
GNGNPLGMDY

SEQ ID NO: 2214 - protein, 446 aa, Artificial Sequence; identical to SEQ ID NO: 2076
  source: /note="Description of Artificial Sequence: Synthetic polypeptide"

SEQ ID NO: 2215 - protein, 106 aa, Artificial Sequence; identical to SEQ ID NO: 2057
  source: /note="Description of Artificial Sequence: Synthetic polypeptide"

SEQ ID NO: 2216 - protein, 10 aa, Artificial Sequence
  source: /note="Description of Artificial Sequence: Synthetic peptide"
GNGNPLGMDY

SEQ ID NO: 2217 - protein, 7 aa, Artificial Sequence
  source: /note="Description of Artificial Sequence: Synthetic peptide"
DTSKLAS

SEQ ID NO: 2218 - protein, 9 aa, Artificial Sequence
  source: /note="Description of Artificial Sequence: Synthetic peptide"
FQGSGYPLT

SEQ ID NO: 2219 - protein, 213 aa, Artificial Sequence; identical to SEQ ID NO: 2061
  source: /note="Description of Artificial Sequence: Synthetic polypeptide"

SEQ ID NO: 2220 - protein, 119 aa, Artificial Sequence; identical to SEQ ID NO: 2072
  source: /note="Description of Artificial Sequence: Synthetic polypeptide"

SEQ ID NO: 2221 - protein, 10 aa, Artificial Sequence
  source: /note="Description of Artificial Sequence: Synthetic peptide"
GYTITNYGMN

SEQ ID NO: 2222 - protein, 10 aa, Artificial Sequence
  source: /note="Description of Artificial Sequence: Synthetic peptide"
WINTYTGEPT

SEQ ID NO: 2223 - protein, 10 aa, Artificial Sequence
  source: /note="Description of Artificial Sequence: Synthetic peptide"
GNGNPLGMDY

SEQ ID NO: 2224 - protein, 446 aa, Artificial Sequence; identical to SEQ ID NO: 2076
  source: /note="Description of Artificial Sequence: Synthetic polypeptide"

SEQ ID NO: 2225 - protein, 106 aa, Artificial Sequence; identical to SEQ ID NO: 2067
  source: /note="Description of Artificial Sequence: Synthetic polypeptide"

SEQ ID NO: 2226 - protein, 10 aa, Artificial Sequence
  source: /note="Description of Artificial Sequence: Synthetic peptide"
GNGNPLGMDY

SEQ ID NO: 2227 - protein, 7 aa, Artificial Sequence
  source: /note="Description of Artificial Sequence: Synthetic peptide"
DTSKLAS

SEQ ID NO: 2228 - protein, 9 aa, Artificial Sequence
  source: /note="Description of Artificial Sequence: Synthetic peptide"
FQGSGYPLT

SEQ ID NO: 2229 - protein, 213 aa, Artificial Sequence; identical to SEQ ID NO: 2071
  source: /note="Description of Artificial Sequence: Synthetic polypeptide"

SEQ ID NO: 2230 - protein, 119 aa, Artificial Sequence; identical to SEQ ID NO: 1952
  source: /note="Description of Artificial Sequence: Synthetic polypeptide"

SEQ ID NO: 2231 - protein, 10 aa, Artificial Sequence
  source: /note="Description of Artificial Sequence: Synthetic peptide"
GFTFSSYIMS

SEQ ID NO: 2232 - protein, 10 aa, Artificial Sequence
  source: /note="Description of Artificial Sequence: Synthetic peptide"
TISGGGTNTY

SEQ ID NO: 2233 - protein, 10 aa, Artificial Sequence
  source: /note="Description of Artificial Sequence: Synthetic peptide"
WLLSYYAMDY

SEQ ID NO: 2234 - protein, 446 aa, Artificial Sequence; identical to SEQ ID NO: 1956
  source: /note="Description of Artificial Sequence: Synthetic polypeptide"

SEQ ID NO: 2235 - protein, 107 aa, Artificial Sequence; identical to SEQ ID NO: 2107
  source: /note="Description of Artificial Sequence: Synthetic polypeptide"

SEQ ID NO: 2236 - protein, 11 aa, Artificial Sequence
  source: /note="Description of Artificial Sequence: Synthetic peptide"
RASQNINVWLS

SEQ ID NO: 2237 - protein, 7 aa, Artificial Sequence
  source: /note="Description of Artificial Sequence: Synthetic peptide"
KASKSHT

SEQ ID NO: 2238 - protein, 9 aa, Artificial Sequence
  source: /note="Description of Artificial Sequence: Synthetic peptide"
QQGQSYPYT

SEQ ID NO: 2239 - protein, 214 aa, Artificial Sequence; identical to SEQ ID NO: 2111
  source: /note="Description of Artificial Sequence: Synthetic polypeptide"

SEQ ID NO: 2240 - protein, 119 aa, Artificial Sequence; identical to SEQ ID NO: 1952
  source: /note="Description of Artificial Sequence: Synthetic polypeptide"

SEQ ID NO: 2241 - protein, 10 aa, Artificial Sequence
  source: /note="Description of Artificial Sequence: Synthetic peptide"
GFTFSSYIMS

SEQ ID NO: 2242 - protein, 10 aa, Artificial Sequence
  source: /note="Description of Artificial Sequence: Synthetic peptide"
TISGGGTNTY

SEQ ID NO: 2243 - protein, 10 aa, Artificial Sequence
  source: /note="Description of Artificial Sequence: Synthetic peptide"
WLLSYYAMDY

SEQ ID NO: 2244 - protein, 446 aa, Artificial Sequence; identical to SEQ ID NO: 1956
  source: /note="Description of Artificial Sequence: Synthetic polypeptide"

SEQ ID NO: 2245 - protein, 107 aa, Artificial Sequence; identical to SEQ ID NO: 1659
  source: /note="Description of Artificial Sequence: Synthetic polypeptide"

SEQ ID NO: 2246 - protein, 11 aa, Artificial Sequence
  source: /note="Description of Artificial Sequence: Synthetic peptide"
RASQNINVWLS

SEQ ID NO: 2247 - protein, 7 aa, Artificial Sequence
  source: /note="Description of Artificial Sequence: Synthetic peptide"
KASKSHT

SEQ ID NO: 2248 - protein, 9 aa, Artificial Sequence
  source: /note="Description of Artificial Sequence: Synthetic peptide"
QQGQSYPYT

SEQ ID NO: 2249 - protein, 214 aa, Artificial Sequence; identical to SEQ ID NO: 1663
  source: /note="Description of Artificial Sequence: Synthetic polypeptide"

SEQ ID NO: 2250 - protein, 119 aa, Artificial Sequence
  source: /note="Description of Artificial Sequence: Synthetic polypeptide"
DVQLVESGGGLVQPGGSRKLSCAASGFTFSNFGMHWVRQAPEKGLEWVAFISSGSSSIYYADTVKGRFTISRDNPKNTLFLQMTSLRSEDTAMYYCARMRLDYYAMDYWGQGTSVTVSS

SEQ ID NO: 2251 - protein, 5 aa, Artificial Sequence
  source: /note="Description of Artificial Sequence: Synthetic peptide"
NFGMH

SEQ ID NO: 2252 - protein, 17 aa, Artificial Sequence
  source: /note="Description of Artificial Sequence: Synthetic peptide"
FISSGSSSIYYADTVKG

SEQ ID NO: 2253 - protein, 10 aa, Artificial Sequence
  source: /note="Description of Artificial Sequence: Synthetic peptide"
MRLDYYAMDY

SEQ ID NO: 2254 - protein, 107 aa, Artificial Sequence
  source: /note="Description of Artificial Sequence: Synthetic polypeptide"
DVQITQSPSYLAASPGETITINCRASKSISKYLAWYQEKPGKTNKLLIYSGSTLQSGIPSRFSGSGSGTDFTLTISSLEPEDFAMYYCQQHNEYPWTFGGGTKLEIK

SEQ ID NO: 2255 - protein, 11 aa, Artificial Sequence
  source: /note="Description of Artificial Sequence: Synthetic peptide"
RASKSISKYLA

SEQ ID NO: 2256 - protein, 7 aa, Artificial Sequence
  source: /note="Description of Artificial Sequence: Synthetic peptide"
SGSTLQS

SEQ ID NO: 2257 - protein, 9 aa, Artificial Sequence
  source: /note="Description of Artificial Sequence: Synthetic peptide"
QQHNEYPWT

SEQ ID NO: 2258 - protein, 119 aa, Artificial Sequence
  source: /note="Description of Artificial Sequence: Synthetic polypeptide"
EVQLQQSGPELVKPGASVKISCKTSGYTFTEYTMHWVKQSHGKNLEWIGGINPNNGGTSYNQKFKGRATLTVDKSSSTAYMELRSLTSDDSAVYYCARPGWYNYAMDYWGQGTSVTVSS

SEQ ID NO: 2259 - protein, 5 aa, Artificial Sequence
  source: /note="Description of Artificial Sequence: Synthetic peptide"
EYTMH

SEQ ID NO: 2260 - protein, 17 aa, Artificial Sequence
  source: /note="Description of Artificial Sequence: Synthetic peptide"
GINPNNGGTSYNQKFKG

SEQ ID NO: 2261 - protein, 10 aa, Artificial Sequence
  source: /note="Description of Artificial Sequence: Synthetic peptide"
PGWYNYAMDY

SEQ ID NO: 2262 - protein, 107 aa, Artificial Sequence
  source: /note="Description of Artificial Sequence: Synthetic polypeptide"
DIVMTQSHKFMSTSVGDRVNITCKASQGVSTAVAWYQQKPGQSPKLLIYSASYRYTGVPDRFTGSGSGTDFTFTISSVQAEDLAVYHCQQHYITPWTFGGGTKLEIK

SEQ ID NO: 2263 - protein, 11 aa, Artificial Sequence
  source: /note="Description of Artificial Sequence: Synthetic peptide"
KASQGVSTAVA

SEQ ID NO: 2264 - protein, 7 aa, Artificial Sequence
  source: /note="Description of Artificial Sequence: Synthetic peptide"
SASYRYT

SEQ ID NO: 2265 - protein, 9 aa, Artificial Sequence
  source: /note="Description of Artificial Sequence: Synthetic peptide"
QQHYITPWT

SEQ ID NO: 2266 - protein, 119 aa, Artificial Sequence
  source: /note="Description of Artificial Sequence: Synthetic polypeptide"
EVQLVESGGGLVKPGGSLKLSCAASGFAFSDYDMSWVRQTPEKRLEWVAYISDGGYNTYYPDTVKGRFTISRDNAKNTLYLQMSSLKSEDTAIYYCARQILLRYYFDYWGQGTTLTVSS

SEQ ID NO: 2267 - protein, 5 aa, Artificial Sequence
  source: /note="Description of Artificial Sequence: Synthetic peptide"
DYDMS

SEQ ID NO: 2268 - protein, 17 aa, Artificial Sequence
  source: /note="Description of Artificial Sequence: Synthetic peptide"
YISDGGYNTYYPDTVKG

SEQ ID NO: 2269 - protein, 10 aa, Artificial Sequence
  source: /note="Description of Artificial Sequence: Synthetic peptide"
QILLRYYFDY

SEQ ID NO: 2270 - protein, 113 aa, Artificial Sequence
  source: /note="Description of Artificial Sequence: Synthetic polypeptide"
DIVMSQSPSSLAVSVGEKVTMTCKSSQSLLYSSNQKNYLAWYQQKPGQSPKLLIYWASTRESGVPDRFTGSGSGTDFTLTISSVKAEDLAVYYCQQYHSYPWTFGGGTKLEIK

SEQ ID NO: 2271 - protein, 17 aa, Artificial Sequence
  source: /note="Description of Artificial Sequence: Synthetic peptide"
KSSQSLLYSSNQKNYLA

SEQ ID NO: 2272 - protein, 7 aa, Artificial Sequence
  source: /note="Description of Artificial Sequence: Synthetic peptide"
WASTRES

SEQ ID NO: 2273 - protein, 9 aa, Artificial Sequence
  source: /note="Description of Artificial Sequence: Synthetic peptide"
QQYHSYPWT

SEQ ID NO: 2274 - protein, 119 aa, Artificial Sequence
  source: /note="Description of Artificial Sequence: Synthetic polypeptide"
EVQLVESGGGLVQPGGSLRLSCAASGFTFSNFGMHWVRQAPGKGLEWVAFISSGSSSIYYADTVKGRFTISRDNAKNSLYLQMNSLRAEDTAVYYCARMRLDYYAMDYWGQGTMVTVSS

SEQ ID NO: 2275 - protein, 107 aa, Artificial Sequence
  source: /note="Description of Artificial Sequence: Synthetic polypeptide"
DIQMTQSPSSLSASVGDRVTITCRASKSISKYLAWYQQKPGKAPKLLIYSGSTLQSGVPSRFSGSGSGTDFTLTISSLQPEDFATYYCQQHNEYPWTFGGGTKVEIK

SEQ ID NO: 2276 - protein, 138 aa, Artificial Sequence
  source: /note="Description of Artificial Sequence: Synthetic polypeptide"
MDSRLNLVFLVLILKGVQCEVQLVESGGGLVQPGGSLRLSCAASGFTFSNFGMHWVRQAPGKGLEWVAFISSGSSSIYYADTVKGRFTISRDNAKNSLYLQMNSLRAEDTAVYYCARMRLDYYAMDYWGQGTMVTVSS

SEQ ID NO: 2277 - protein, 127 aa, Artificial Sequence
  source: /note="Description of Artificial Sequence: Synthetic polypeptide"
MRFQVQVLGLLLLWISGAQCDIQMTQSPSSLSASVGDRVTITCRASKSISKYLAWYQQKPGKAPKLLIYSGSTLQSGVPSRFSGSGSGTDFTLTISSLQPEDFATYYCQQHNEYPWTFGGGTKVEIK

SEQ ID NO: 2278 - protein, 119 aa, Artificial Sequence
  source: /note="Description of Artificial Sequence: Synthetic polypeptide"
EVQLVESGGGLTQPGKSLKLSCEASGFTFSSFTMHWVRQSPGKGLEWVAFIRSGSGIVFYADAVRGRFTISRDNAKNLLFLQMNDLKSEDTAMYYCARRPLGHNTFDSWGQGTLVTVSS

SEQ ID NO: 2279 - protein, 10 aa, Artificial Sequence
  source: /note="Description of Artificial Sequence: Synthetic peptide"
GFTFSSFTMH

SEQ ID NO: 2280 - protein, 17 aa, Artificial Sequence
  source: /note="Description of Artificial Sequence: Synthetic peptide"
FIRSGSGIVFYADAVRG

SEQ ID NO: 2281 - protein, 10 aa, Artificial Sequence
  source: /note="Description of Artificial Sequence: Synthetic peptide"
RPLGHNTFDS

SEQ ID NO: 2282 - protein, 114 aa, Artificial Sequence
  source: /note="Description of Artificial Sequence: Synthetic polypeptide"
DIVMTQSPSSLAVSPGEKVTMTCKSSQSLYYSGVKENLLAWYQQKPGQSPKLLIYYASIRFTGVPDRFTGSGSGTDYTLTITSVQAEDMGQYFCQQGINNPLTFGDGTKLEIKR

SEQ ID NO: 2283 - protein, 17 aa, Artificial Sequence
  source: /note="Description of Artificial Sequence: Synthetic peptide"
KSSQSLYYSGVKENLLA

SEQ ID NO: 2284 - protein, 6 aa, Artificial Sequence
  source: /note="Description of Artificial Sequence: Synthetic peptide"
ASIRFT

SEQ ID NO: 2285 - protein, 9 aa, Artificial Sequence
  source: /note="Description of Artificial Sequence: Synthetic peptide"
QQGINNPLT

SEQ ID NO: 2286 - protein, 119 aa, Artificial Sequence
  source: /note="Description of Artificial Sequence: Synthetic polypeptide"
EVQLQQSGPELVKPGTSMKISCKASGYSFTGHLMNWVKQSHGKNLEWIGLIIPYNGGTSYNQKFKGKATLTVDKSSSTAYMELLSLTSDDSAVYFCSRGLRGFYAMDYWGQGTSVTVSS

SEQ ID NO: 2287 - protein, 10 aa, Artificial Sequence
  source: /note="Description of Artificial Sequence: Synthetic peptide"
GYSFTGHLMN

SEQ ID NO: 2288 - protein, 17 aa, Artificial Sequence
  source: /note="Description of Artificial Sequence: Synthetic peptide"
LIIPYNGGTSYNQKFKG

SEQ ID NO: 2289 - protein, 10 aa, Artificial Sequence
  source: /note="Description of Artificial Sequence: Synthetic peptide"
GLRGFYAMDY

SEQ ID NO: 2290 - protein, 112 aa, Artificial Sequence
  source: /note="Description of Artificial Sequence: Synthetic polypeptide"
DVVLTQTPLSLSVSFGDQVSISCRSSQSLVNSYGNTFLSWYLHKPGQSPQLLIFGISNRFSGVPDRFSGSGSGTDFTLKISTIKPEDLGMYYCLQGTHQPPTFGPGTKLEVK

SEQ ID NO: 2291 - protein, 16 aa, Artificial Sequence
  source: /note="Description of Artificial Sequence: Synthetic peptide"
RSSQSLVNSYGNTFLS

SEQ ID NO: 2292 - protein, 7 aa, Artificial Sequence
  source: /note="Description of Artificial Sequence: Synthetic peptide"
GISNRFS

SEQ ID NO: 2293 - protein, 9 aa, Artificial Sequence
  source: /note="Description of Artificial Sequence: Synthetic peptide"
LQGTHQPPT

SEQ ID NO: 2294 - protein, 11 aa, Artificial Sequence
  source: /note="Description of Artificial Sequence: Synthetic peptide"
GSITSSSYYWG

SEQ ID NO: 2295 - protein, 11 aa, Artificial Sequence
  source: /note="Description of Artificial Sequence: Synthetic peptide"
GSISSSKYYWG

SEQ ID NO: 2296 - protein, 11 aa, Artificial Sequence
  source: /note="Description of Artificial Sequence: Synthetic peptide"
GSISSTSHYWG

SEQ ID NO: 2297 - protein, 11 aa, Artificial Sequence
  source: /note="Description of Artificial Sequence: Synthetic peptide"
GSISSTSHYWG

SEQ ID NO: 2298 - protein, 11 aa, Artificial Sequence
  source: /note="Description of Artificial Sequence: Synthetic peptide"
GSISSTSHYWG

SEQ ID NO: 2299 - protein, 16 aa, Artificial Sequence
  source: /note="Description of Artificial Sequence: Synthetic peptide"
SIYYSGATFYNPSLKS

SEQ ID NO: 2300 - protein, 16 aa, Artificial Sequence
  source: /note="Description of Artificial Sequence: Synthetic peptide"
SIYYSGSTFYNPSLKS

SEQ ID NO: 2301 - protein, 16 aa, Artificial Sequence
  source: /note="Description of Artificial Sequence: Synthetic peptide"
SIYYSGSTFYNPSLKS

SEQ ID NO: 2302 - protein, 16 aa, Artificial Sequence
  source: /note="Description of Artificial Sequence: Synthetic peptide"
SIYYSGSTFYNPSLKS

SEQ ID NO: 2303 - protein, 16 aa, Artificial Sequence
  source: /note="Description of Artificial Sequence: Synthetic peptide"
SIYYSGSTFYNPSLKG

SEQ ID NO: 2304 - protein, 15 aa, Artificial Sequence
  source: /note="Description of Artificial Sequence: Synthetic peptide"
ARDANYYGSAWAFDP

SEQ ID NO: 2305 - protein, 15 aa, Artificial Sequence
  source: /note="Description of Artificial Sequence: Synthetic peptide"
ARDANYYGSAWAFDP

SEQ ID NO: 2306 - protein, 15 aa, Artificial Sequence
  source: /note="Description of Artificial Sequence: Synthetic peptide"
ARDANYYGSAWAFDP

SEQ ID NO: 2307 - protein, 15 aa, Artificial Sequence
  source: /note="Description of Artificial Sequence: Synthetic peptide"
ARDANYYGGAWAFDP

SEQ ID NO: 2308 - protein, 15 aa, Artificial Sequence
  source: /note="Description of Artificial Sequence: Synthetic peptide"
ARDANYYGSAWAFDP

SEQ ID NO: 2309 - protein, 123 aa, Artificial Sequence
  source: /note="Description of Artificial Sequence: Synthetic polypeptide"
QLQLQESGPGLVKPSETLSLTCTVSGGSITSSSYYWGWIRQPPGKGLEWIGSIYYSGATFYNPSLKSRVTISVDTSKNQFSLKLSSVTAADTAVYYCARDANYYGSAWAFDPWGQGTLVTVSS

SEQ ID NO: 2310 - protein, 123 aa, Artificial Sequence
  source: /note="Description of Artificial Sequence: Synthetic polypeptide"
QLQLQESGPGLVKPSETLSLTCTVSGGSISSSKYYWGWIRQPPGKGLEWIGSIYYSGSTFYNPSLKSRVTISVDTSKNQFSLKLSSVTAADTAVYYCARDANYYGSAWAFDPWGQGTLVTVSS

SEQ ID NO: 2311 - protein, 123 aa, Artificial Sequence
  source: /note="Description of Artificial Sequence: Synthetic polypeptide"
QLQLQESGPGLVKPSETLSLTCTVSGGSISSTSHYWGWIRQPPGKGLEWIGSIYYSGSTFYNPSLKSRVTISVDTSKNQFSLKLSSVTAADTAVYYCARDANYYGSAWAFDPWGQGTLVTVSS

SEQ ID NO: 2312 - protein, 123 aa, Artificial Sequence
  source: /note="Description of Artificial Sequence: Synthetic polypeptide"
QLQLQESGPGLVKPSETLSLTCTVSGGSISSTSHYWGWIRQPPGKGLEWIGSIYYSGSTFYNPSLKSRVTISVDTSKNQFSLKLSSVTAADTAVYYCARDANYYGGAWAFDPWGQGTLVTVSS

SEQ ID NO: 2313 - protein, 123 aa, Artificial Sequence
  source: /note="Description of Artificial Sequence: Synthetic polypeptide"
QLQLQESGPGLVKPSETLSLTCTVSGGSISSTSHYWGWIRQPPGKGLEWIGSIYYSGSTFYNPSLKGRVTISVDTSKNQFSLKLSSVTAADTAVYYCARDANYYGSAWAFDPWGQGTLVTVSS

SEQ ID NO: 2314 - protein, 11 aa, Artificial Sequence
  source: /note="Description of Artificial Sequence: Synthetic peptide"
RASQSVSSYLA

SEQ ID NO: 2315 - protein, 11 aa, Artificial Sequence
  source: /note="Description of Artificial Sequence: Synthetic peptide"
RASQSVSSYLA

SEQ ID NO: 2316 - protein, 11 aa, Artificial Sequence
  source: /note="Description of Artificial Sequence: Synthetic peptide"
RASQSVSSYLA

SEQ ID NO: 2317 - protein, 11 aa, Artificial Sequence
  source: /note="Description of Artificial Sequence: Synthetic peptide"
RASQSVSSYLA

SEQ ID NO: 2318 - protein, 11 aa, Artificial Sequence
  source: /note="Description of Artificial Sequence: Synthetic peptide"
RASQSVSSYLA

SEQ ID NO: 2319 - protein, 7 aa, Artificial Sequence
  source: /note="Description of Artificial Sequence: Synthetic peptide"
DASNRAT

SEQ ID NO: 2320 - protein, 7 aa, Artificial Sequence
  source: /note="Description of Artificial Sequence: Synthetic peptide"
DASNRAT

SEQ ID NO: 2321 - protein, 7 aa, Artificial Sequence
  source: /note="Description of Artificial Sequence: Synthetic peptide"
DASNRAT

SEQ ID NO: 2322 - protein, 7 aa, Artificial Sequence
  source: /note="Description of Artificial Sequence: Synthetic peptide"
DASNRAT

SEQ ID NO: 2323 - protein, 7 aa, Artificial Sequence
  source: /note="Description of Artificial Sequence: Synthetic peptide"
DASNRAT

SEQ ID NO: 2324 - protein, 8 aa, Artificial Sequence
  source: /note="Description of Artificial Sequence: Synthetic peptide"
QQHFNLPT

SEQ ID NO: 2325 - protein, 8 aa, Artificial Sequence
  source: /note="Description of Artificial Sequence: Synthetic peptide"
QQHFNLPT

SEQ ID NO: 2326 - protein, 8 aa, Artificial Sequence
  source: /note="Description of Artificial Sequence: Synthetic peptide"
QQHFNLPT

SEQ ID NO: 2327 - protein, 8 aa, Artificial Sequence
  source: /note="Description of Artificial Sequence: Synthetic peptide"
QQHFNLPT

SEQ ID NO: 2328 - protein, 8 aa, Artificial Sequence
  source: /note="Description of Artificial Sequence: Synthetic peptide"
QQHFNLPT

SEQ ID NO: 2329 - protein, 106 aa, Artificial Sequence
  source: /note="Description of Artificial Sequence: Synthetic polypeptide"
EIVLTQSPATLSLSPGERATLSCRASQSVSSYLAWYQQKPGQAPRLLIYDASNRATGIPARFSGSGSGTDFTLTISSLEPEDFAVYYCQQHFNLPTFGGGTKVEIK

SEQ ID NO: 2330 - protein, 106 aa, Artificial Sequence; identical to SEQ ID NO: 2329
  source: /note="Description of Artificial Sequence: Synthetic polypeptide"

SEQ ID NO: 2331 - protein, 106 aa, Artificial Sequence; identical to SEQ ID NO: 2329
  source: /note="Description of Artificial Sequence: Synthetic polypeptide"

SEQ ID NO: 2332 - protein, 106 aa, Artificial Sequence; identical to SEQ ID NO: 2329
  source: /note="Description of Artificial Sequence: Synthetic polypeptide"

SEQ ID NO: 2333 - protein, 106 aa, Artificial Sequence; identical to SEQ ID NO: 2329
  source: /note="Description of Artificial Sequence: Synthetic polypeptide"

SEQ ID NO: 2334 - protein, 11 aa, Artificial Sequence
  source: /note="Description of Artificial Sequence: Synthetic peptide"
GSIESGSYYWG

SEQ ID NO: 2335 - protein, 11 aa, Artificial Sequence
  source: /note="Description of Artificial Sequence: Synthetic peptide"
GSIESGVYYWG

SEQ ID NO: 2336 - protein, 11 aa, Artificial Sequence
  source: /note="Description of Artificial Sequence: Synthetic peptide"
GSIASGSYYWG

SEQ ID NO: 2337 - protein, 11 aa, Artificial Sequence
  source: /note="Description of Artificial Sequence: Synthetic peptide"
GSIESGLYYWG

SEQ ID NO: 2338 - protein, 11 aa, Artificial Sequence
  source: /note="Description of Artificial Sequence: Synthetic peptide"
GSIESGLYYWG

SEQ ID NO: 2339 - protein, 16 aa, Artificial Sequence
  source: /note="Description of Artificial Sequence: Synthetic peptide"
SIYYSGGTYYNPSLKS

SEQ ID NO: 2340 - protein, 16 aa, Artificial Sequence
  source: /note="Description of Artificial Sequence: Synthetic peptide"
SIYYSGSTYYNPSLKS

SEQ ID NO: 2341 - protein, 16 aa, Artificial Sequence
  source: /note="Description of Artificial Sequence: Synthetic peptide"
SIYYSGQTYYNPSLKS

SEQ ID NO: 2342 - protein, 16 aa, Artificial Sequence
  source: /note="Description of Artificial Sequence: Synthetic peptide"
SIYYSGSTYYNPSLKS

SEQ ID NO: 2343 - protein, 16 aa, Artificial Sequence
  source: /note="Description of Artificial Sequence: Synthetic peptide"
SIYYSGSTYYNPSLKS

SEQ ID NO: 2344 - protein, 15 aa, Artificial Sequence
  source: /note="Description of Artificial Sequence: Synthetic peptide"
ARDGVLTLNKRSFDI

SEQ ID NO: 2345 - protein, 15 aa, Artificial Sequence
  source: /note="Description of Artificial Sequence: Synthetic peptide"
ARDGVLTLNKRSFDI

SEQ ID NO: 2346 - protein, 15 aa, Artificial Sequence
  source: /note="Description of Artificial Sequence: Synthetic peptide"
ARDGVLTLNKRSFDI

SEQ ID NO: 2347 - protein, 15 aa, Artificial Sequence
  source: /note="Description of Artificial Sequence: Synthetic peptide"
ARDGVLTLNKRSFDI

SEQ ID NO: 2348 - protein, 15 aa, Artificial Sequence
  source: /note="Description of Artificial Sequence: Synthetic peptide"
ARDGVLALNKRSFDI

SEQ ID NO: 2349 - protein, 123 aa, Artificial Sequence
  source: /note="Description of Artificial Sequence: Synthetic polypeptide"
QLQLQESGPGLVKPSETLSLTCTVSGGSIESGSYYWGWIRQPPGKGLEWIGSIYYSGGTYYNPSLKSRVTISVDTSKNQFSLKLSSVTAADTAVYYCARDGVLTLNKRSFDIWGQGTMVTVSS

SEQ ID NO: 2350 - protein, 123 aa, Artificial Sequence
  source: /note="Description of Artificial Sequence: Synthetic polypeptide"
QVQLQESGPGLVKPSQTLSLTCTVSGGSIESGVYYWGWIRQPPGKGLEWIGSIYYSGSTYYNPSLKSRVTISVDTSKNQFSLKLSSVTAADTAVYYCARDGVLTLNKRSFDIWGQGTMVTVSS

SEQ ID NO: 2351 - protein, 123 aa, Artificial Sequence
  source: /note="Description of Artificial Sequence: Synthetic polypeptide"
QLQLQESGPGLVKPSETLSLTCTVSGGSIASGSYYWGWIRQPPGKGLEWIGSIYYSGQTYYNPSLKSRVTISVDTSKNQFSLKLSSVTAADTAVYYCARDGVLTLNKRSFDIWGQGTMVTVSS

SEQ ID NO: 2352 - protein, 123 aa, Artificial Sequence
  source: /note="Description of Artificial Sequence: Synthetic polypeptide"
QVQLQESGPGLVKPSQTLSLTCTVSGGSIESGLYYWGWIRQPPGKGLEWIGSIYYSGSTYYNPSLKSRVTISVDTSKNQFSLKLSSVTAADTAVYYCARDGVLTLNKRSFDIWGQGTMVTVSS

SEQ ID NO: 2353 - protein, 123 aa, Artificial Sequence
  source: /note="Description of Artificial Sequence: Synthetic polypeptide"
QVQLQESGPGLVKPSQTLSLTCTVSGGSIESGLYYWGWIRQPPGKGLEWIGSIYYSGSTYYNPSLKSRATISVDTSKNQFSLKLSSVTAADTAVYYCARDGVLALNKRSFDIWGQGTMVTVSS

SEQ ID NO: 2354 - protein, 12 aa, Artificial Sequence
  source: /note="Description of Artificial Sequence: Synthetic peptide"
RASQSVSSSYLA

SEQ ID NO: 2355 - protein, 12 aa, Artificial Sequence
  source: /note="Description of Artificial Sequence: Synthetic peptide"
RASQSVSSSYLA

SEQ ID NO: 2356 - protein, 12 aa, Artificial Sequence
  source: /note="Description of Artificial Sequence: Synthetic peptide"
RASQSVSSSYLA

SEQ ID NO: 2357 - protein, 12 aa, Artificial Sequence
  source: /note="Description of Artificial Sequence: Synthetic peptide"
RASQSVSSSYLA

SEQ ID NO: 2358 - protein, 12 aa, Artificial Sequence
  source: /note="Description of Artificial Sequence: Synthetic peptide"
RASQSVSSSYLA

SEQ ID NO: 2359 - protein, 7 aa, Artificial Sequence
  source: /note="Description of Artificial Sequence: Synthetic peptide"
GASSRAT

SEQ ID NO: 2360 - protein, 7 aa, Artificial Sequence
  source: /note="Description of Artificial Sequence: Synthetic peptide"
GASSRAT

SEQ ID NO: 2361 - protein, 7 aa, Artificial Sequence
  source: /note="Description of Artificial Sequence: Synthetic peptide"
GASSRAT

SEQ ID NO: 2362 - protein, 7 aa, Artificial Sequence
  source: /note="Description of Artificial Sequence: Synthetic peptide"
GASSRAT

SEQ ID NO: 2363 - protein, 7 aa, Artificial Sequence
  source: /note="Description of Artificial Sequence: Synthetic peptide"
GASSRAT

SEQ ID NO: 2364 - protein, 10 aa, Artificial Sequence
  source: /note="Description of Artificial Sequence: Synthetic peptide"
QQHTVRPPLT

SEQ ID NO: 2365 - protein, 10 aa, Artificial Sequence
  source: /note="Description of Artificial Sequence: Synthetic peptide"
QQHTVRPPLT

SEQ ID NO: 2366 - protein, 10 aa, Artificial Sequence
  source: /note="Description of Artificial Sequence: Synthetic peptide"
QQHTVRPPLT

SEQ ID NO: 2367 - protein, 10 aa, Artificial Sequence
  source: /note="Description of Artificial Sequence: Synthetic peptide"
QQHTVRPPLT

SEQ ID NO: 2368 - protein, 10 aa, Artificial Sequence
  source: /note="Description of Artificial Sequence: Synthetic peptide"
QQHTVRPPLT

SEQ ID NO: 2369 - protein, 109 aa, Artificial Sequence
  source: /note="Description of Artificial Sequence: Synthetic polypeptide"
EIVLTQSPGTLSLSPGERATLSCRASQSVSSSYLAWYQQKPGQAPRLLIYGASSRATGIPDRFSGSGSGTDFTLTISRLEPEDFAVYYCQQHTVRPPLTFGGGTKVEIK

SEQ ID NO: 2370 - protein, 109 aa, Artificial Sequence; identical to SEQ ID NO: 2369
  source: /note="Description of Artificial Sequence: Synthetic polypeptide"

SEQ ID NO: 2371 - protein, 109 aa, Artificial Sequence; identical to SEQ ID NO: 2369
  source: /note="Description of Artificial Sequence: Synthetic polypeptide"

SEQ ID NO: 2372 - protein, 109 aa, Artificial Sequence; identical to SEQ ID NO: 2369
  source: /note="Description of Artificial Sequence: Synthetic polypeptide"

SEQ ID NO: 2373 - protein, 109 aa, Artificial Sequence; identical to SEQ ID NO: 2369
  source: /note="Description of Artificial Sequence: Synthetic polypeptide"

SEQ ID NO: 2374 - protein, 11 aa, Artificial Sequence
  source: /note="Description of Artificial Sequence: Synthetic peptide"
GSIESGLYYWG

SEQ ID NO: 2375 - protein, 11 aa, Artificial Sequence
  source: /note="Description of Artificial Sequence: Synthetic peptide"
GSIESGLYYWG

SEQ ID NO: 2376 - protein, 9 aa, Artificial Sequence
  source: /note="Description of Artificial Sequence: Synthetic peptide"
YTFGNYYMH

SEQ ID NO: 2377 - protein, 9 aa, Artificial Sequence
  source: /note="Description of Artificial Sequence: Synthetic peptide"
YTFPAYYMH

SEQ ID NO: 2378 - protein, 9 aa, Artificial Sequence
  source: /note="Description of Artificial Sequence: Synthetic peptide"
YTFREYYMH

SEQ ID NO: 2379 - protein, 16 aa, Artificial Sequence
  source: /note="Description of Artificial Sequence: Synthetic peptide"
SIYYSGSTYYNPSLKS

SEQ ID NO: 2380 - protein, 16 aa, Artificial Sequence
  source: /note="Description of Artificial Sequence: Synthetic peptide"
SIYYSGSTYYNPSLKS

SEQ ID NO: 2381 - protein, 17 aa, Artificial Sequence
  source: /note="Description of Artificial Sequence: Synthetic peptide"
IINPSLGLTSYAQKFQG

SEQ ID NO: 2382 - protein, 17 aa, Artificial Sequence
  source: /note="Description of Artificial Sequence: Synthetic peptide"
IINPSLGLTSYAQKFQG

SEQ ID NO: 2383 - protein, 17 aa, Artificial Sequence
  source: /note="Description of Artificial Sequence: Synthetic peptide"
IINPSIGLTSYARKFQG

SEQ ID NO: 2384 - protein, 15 aa, Artificial Sequence
  source: /note="Description of Artificial Sequence: Synthetic peptide"
ARDGVLALNKRSFDI

SEQ ID NO: 2385 - protein, 15 aa, Artificial Sequence
  source: /note="Description of Artificial Sequence: Synthetic peptide"
ARDGVLALNKRSFDI

SEQ ID NO: 2386 - protein, 14 aa, Artificial Sequence
  source: /note="Description of Artificial Sequence: Synthetic peptide"
ARGGRTTWIGAFDI

SEQ ID NO: 2387 - protein, 14 aa, Artificial Sequence
  source: /note="Description of Artificial Sequence: Synthetic peptide"
ARGGRTTWIGAFDI

SEQ ID NO: 2388 - protein, 14 aa, Artificial Sequence
  source: /note="Description of Artificial Sequence: Synthetic peptide"
ARGGRTTWIGAFDI

SEQ ID NO: 2389 - protein, 123 aa, Artificial Sequence
  source: /note="Description of Artificial Sequence: Synthetic polypeptide"
QVQLQESGPGLVKPSQTLSLTCTVSGGSIESGLYYWGWIRQPPGKGLEWIGSIYYSGSTYYNPSLKSRVTISVDTSKNQFSLKLSSVTAADTAVYYCARDGVLALNKRSFDIWGQGTMVTVSS

SEQ ID NO: 2390 - protein, 123 aa, Artificial Sequence
  source: /note="Description of Artificial Sequence: Synthetic polypeptide"
QVQLQESGPGLVKPSQTLSLTCTASGGSIESGLYYWGWIRQPPGKGLEWIGSIYYSGSTYYNPSLKSRVTISVDTSKNQFSLKLSSVTAADTAVYYCARDGVLALNKRSFDIWGQGTMVTVSS

SEQ ID NO: 2391 - protein, 121 aa, Artificial Sequence
  source: /note="Description of Artificial Sequence: Synthetic polypeptide"
QVQLVQSGAEVKKPGASVKVSCKASGYTFGNYYMHWVRQAPGQGLEWMGIINPSLGLTSYAQKFQGRVTMTRDTSTSTVYMELSSLRSEDTAVYYCARGGRTTWIGAFDIWGQGTMVTVSS

SEQ ID NO: 2392 - protein, 121 aa, Artificial Sequence
  source: /note="Description of Artificial Sequence: Synthetic polypeptide"
QVQLVQSGAEVKKPGASVKVSCKASGYTFPAYYMHWVRQAPGQGLEWMGIINPSLGLTSYAQKFQGRVTMTRDTSTSTVYMELSSLRSEDTAVYYCARGGRTTWIGAFDIWGQGTMVTVSS

SEQ ID NO: 2393 - protein, 121 aa, Artificial Sequence
  source: /note="Description of Artificial Sequence: Synthetic polypeptide"
QVQLVQSGAEVKKPGASVKVSCKASGYTFREYYMHWVRQAPGQGLEWMGIINPSIGLTSYARKFQGRVTMTRDTSTSTVYMELSSLRSEDTAVYYCARGGRTTWIGAFDIWGQGTMVTVSS

SEQ ID NO: 2394 - protein, 12 aa, Artificial Sequence
  source: /note="Description of Artificial Sequence: Synthetic peptide"
RASQSVSSSYLA

SEQ ID NO: 2395 - protein, 12 aa, Artificial Sequence
  source: /note="Description of Artificial Sequence: Synthetic peptide"
RASQSVSSSYLA

SEQ ID NO: 2396 - protein, 11 aa, Artificial Sequence
  source: /note="Description of Artificial Sequence: Synthetic peptide"
RASQSVSSNLA

SEQ ID NO: 2397 - protein, 11 aa, Artificial Sequence
  source: /note="Description of Artificial Sequence: Synthetic peptide"
RASQSVSSNLA

SEQ ID NO: 2398 - protein, 11 aa, Artificial Sequence
  source: /note="Description of Artificial Sequence: Synthetic peptide"
RASQSVSSNLA

SEQ ID NO: 2399 - protein, 7 aa, Artificial Sequence
  source: /note="Description of Artificial Sequence: Synthetic peptide"
GASSRAT

SEQ ID NO: 2400 - protein, 7 aa, Artificial Sequence
  source: /note="Description of Artificial Sequence: Synthetic peptide"
GASSRAT

SEQ ID NO: 2401 - protein, 7 aa, Artificial Sequence
  source: /note="Description of Artificial Sequence: Synthetic peptide"
GASTRAT

SEQ ID NO: 2402 - protein, 7 aa, Artificial Sequence
  source: /note="Description of Artificial Sequence: Synthetic peptide"
GASTRAT

SEQ ID NO: 2403 - protein, 7 aa, Artificial Sequence
  source: /note="Description of Artificial Sequence: Synthetic peptide"
GASTRAT

SEQ ID NO: 2404 - protein, 10 aa, Artificial Sequence
  source: /note="Description of Artificial Sequence: Synthetic peptide"
QQHTVRPPLT

SEQ ID NO: 2405 - protein, 10 aa, Artificial Sequence
  source: /note="Description of Artificial Sequence: Synthetic peptide"
QQHTVRPPLT

SEQ ID NO: 2406 - protein, 10 aa, Artificial Sequence
  source: /note="Description of Artificial Sequence: Synthetic peptide"
QQYVVWPPLT

SEQ ID NO: 2407 - protein, 10 aa, Artificial Sequence
  source: /note="Description of Artificial Sequence: Synthetic peptide"
QQYVVWPPLT

SEQ ID NO: 2408 - protein, 10 aa, Artificial Sequence
  source: /note="Description of Artificial Sequence: Synthetic peptide"
QQYVVWPPLT

SEQ ID NO: 2409 - protein, 109 aa, Artificial Sequence; identical to SEQ ID NO: 2369
  source: /note="Description of Artificial Sequence: Synthetic polypeptide"

SEQ ID NO: 2410 - protein, 109 aa, Artificial Sequence; identical to SEQ ID NO: 2369
  source: /note="Description of Artificial Sequence: Synthetic polypeptide"

SEQ ID NO: 2411 - protein, 108 aa, Artificial Sequence
  source: /note="Description of Artificial Sequence: Synthetic polypeptide"
EIVMTQSPATISVSPGERATLSCRASQSVSSNLAWYQQKPGQAPRLLIYGASTRATGIPARFSGSGSGTEFTLTISSLQSEDFAVYYCQQYVVWPPLTFGGGTKVEIK

SEQ ID NO: 2412 - protein, 108 aa, Artificial Sequence
  source: /note="Description of Artificial Sequence: Synthetic polypeptide"
EIVMTQSPATLSVSPGERATLSCRASQSVSSNLAWYQQKPGQAPRLLIYGASTRATGIPARFSGSGSGTEFTLTISSLQSEDFAVYYCQQYVVWPPLTFGGGTKVEIK

SEQ ID NO: 2413 - protein, 108 aa, Artificial Sequence; identical to SEQ ID NO: 2412
  source: /note="Description of Artificial Sequence: Synthetic polypeptide"

SEQ ID NO: 2414 - protein, 9 aa, Artificial Sequence
  source: /note="Description of Artificial Sequence: Synthetic peptide"
YTFREYYMH

SEQ ID NO: 2415 - protein, 9 aa, Artificial Sequence
  source: /note="Description of Artificial Sequence: Synthetic peptide"
YTFPAYYIH

SEQ ID NO: 2416 - protein, 9 aa, Artificial Sequence
  source: /note="Description of Artificial Sequence: Synthetic peptide"
YTFPAYYMH

SEQ ID NO: 2417 - protein, 9 aa, Artificial Sequence
  source: /note="Description of Artificial Sequence: Synthetic peptide"
YTFTSHYMG

SEQ ID NO: 2418 - protein, 9 aa, Artificial Sequence
  source: /note="Description of Artificial Sequence: Synthetic peptide"
YTFTSHYMG

SEQ ID NO: 2419 - protein, 9 aa, Artificial Sequence
  source: /note="Description of Artificial Sequence: Synthetic peptide"
YTFTSHYMG

SEQ ID NO: 2420 - protein, 17 aa, Artificial Sequence
  source: /note="Description of Artificial Sequence: Synthetic peptide"
IINPSIGLTSYARKFQG

SEQ ID NO: 2421 - protein, 17 aa, Artificial Sequence
  source: /note="Description of Artificial Sequence: Synthetic peptide"
IINPSLGLTSYARKFQG

SEQ ID NO: 2422 - protein, 17 aa, Artificial Sequence
  source: /note="Description of Artificial Sequence: Synthetic peptide"
IINPSLGLTSYARKFQG

SEQ ID NO: 2423 - protein, 17 aa, Artificial Sequence
  source: /note="Description of Artificial Sequence: Synthetic peptide"
VINPSMGATSYAQKFQG

SEQ ID NO: 2424 - protein, 17 aa, Artificial Sequence
  source: /note="Description of Artificial Sequence: Synthetic peptide"
IINPSMGATSYAQKFQG

SEQ ID NO: 2425 - protein, 17 aa, Artificial Sequence
  source: /note="Description of Artificial Sequence: Synthetic peptide"
IINPSMGATSYTQKFRG

SEQ ID NO: 2426 - protein, 14 aa, Artificial Sequence
  source: /note="Description of Artificial Sequence: Synthetic peptide"
ARGGRTTWIGALDI

SEQ ID NO: 2427 - protein, 14 aa, Artificial Sequence
  source: /note="Description of Artificial Sequence: Synthetic peptide"
ARGGRTTWIGALDI

SEQ ID NO: 2428 - protein, 14 aa, Artificial Sequence
  source: /note="Description of Artificial Sequence: Synthetic peptide"
ARGGRTTWIGAFDI

SEQ ID NO: 2429 - protein, 16 aa, Artificial Sequence
  source: /note="Description of Artificial Sequence: Synthetic peptide"
ARLHVSGSYYPAYLDY

SEQ ID NO: 2430 - protein, 16 aa, Artificial Sequence
  source: /note="Description of Artificial Sequence: Synthetic peptide"
ARLHVSGSYYPAYLDY

SEQ ID NO: 2431 - protein, 16 aa, Artificial Sequence
  source: /note="Description of Artificial Sequence: Synthetic peptide"
ARLHVSGSYYPAYLDY

SEQ ID NO: 2432 - protein, 121 aa, Artificial Sequence
  source: /note="Description of Artificial Sequence: Synthetic polypeptide"
QVQLVQSGAEVKKPGASVKVSCKASGYTFREYYMHWVRQAPGQGLEWMGIINPSIGLTSYARKFQGRVTMTRDTSTSTVYMELSSLRSEDTAVYYCARGGRTTWIGALDIWGQGTMVTVSS

SEQ ID NO: 2433 - protein, 121 aa, Artificial Sequence
  source: /note="Description of Artificial Sequence: Synthetic polypeptide"
QVQLVQSGAEVKKPGASVKVSCKASGYTFPAYYIHWVRQAPGQGLEWMGIINPSLGLTSYARKFQGRVTMTRDTSTSTVYMELSSLRSEDTAVYYCARGGRTTWIGALDIWGQGTMVTVSS

SEQ ID NO: 2434 - protein, 121 aa, Artificial Sequence
  source: /note="Description of Artificial Sequence: Synthetic polypeptide"
QVQLVQSGAEVKKPGASVKVSCKASGYTFPAYYMHWVRQAPGQGLEWMGIINPSLGLTSYARKFQGRVTMTRDTSTSTVYMELSSLRSEDTAVYYCARGGRTTWIGAFDIWGQGTMVTVSS

SEQ ID NO: 2435 - protein, 124 aa, Artificial Sequence
  source: /note="Description of Artificial Sequence: Synthetic polypeptide"
QVQLVQSGAEVKKPGASVKVSCKASGYTFTSHYMGWVRQAPGQGLEWMGVINPSMGATSYAQKFQGRVTMTRDTSTLSTVYMELSSLRSEDTAVYYCARLHVSGSYYPAYLDYWGQGTMVTVSS

SEQ ID NO: 2436 - protein, 123 aa, Artificial Sequence
  source: /note="Description of Artificial Sequence: Synthetic polypeptide"
QVQLVQSGAEVKKPGASVKVSCKASGYTFTSHYMGWVRQAPGQGLEWVGIINPSMGATSYAQKFQGRVTMTRDTSTSTVYMELSSLASEDTAVYYCARLHVSGSYYPAYLDYWGQGTMVTVSS

SEQ ID NO: 2437 - protein, 123 aa, Artificial Sequence
  source: /note="Description of Artificial Sequence: Synthetic polypeptide"
QVQLVQSGAEVKKPGASVKVSCKASGYTFTSHYMGWVRQAPGQGLEWMGIINPSMGATSYTQKFRGRVTMTRDTSTSTVYMELSSLASEDTAVYYCARLHVSGSYYPAYLDYWGQGTMVTVSS

SEQ ID NO: 2438 - protein, 11 aa, Artificial Sequence
  source: /note="Description of Artificial Sequence: Synthetic peptide"
RASQSVSSNLA

SEQ ID NO: 2439 - protein, 11 aa, Artificial Sequence
  source: /note="Description of Artificial Sequence: Synthetic peptide"
RASQSVSSNLA

SEQ ID NO: 2440 - protein, 11 aa, Artificial Sequence
  source: /note="Description of Artificial Sequence: Synthetic peptide"
RASQSVSSNLA

SEQ ID NO: 2441 - protein, 11 aa, Artificial Sequence
  source: /note="Description of Artificial Sequence: Synthetic peptide"
RASQSVSSNLA

SEQ ID NO: 2442 - protein, 11 aa, Artificial Sequence
  source: /note="Description of Artificial Sequence: Synthetic peptide"
RASQSVSSNLA

SEQ ID NO: 2443 - protein, 11 aa, Artificial Sequence
  source: /note="Description of Artificial Sequence: Synthetic peptide"
RASQSVSSNLA

SEQ ID NO: 2444 - protein, 7 aa, Artificial Sequence
  source: /note="Description of Artificial Sequence: Synthetic peptide"
GASTRAT

SEQ ID NO: 2445 - protein, 7 aa, Artificial Sequence
  source: /note="Description of Artificial Sequence: Synthetic peptide"
GASTRAT

SEQ ID NO: 2446 - protein, 7 aa, Artificial Sequence
  source: /note="Description of Artificial Sequence: Synthetic peptide"
GASTRAT

SEQ ID NO: 2447 - protein, 7 aa, Artificial Sequence
  source: /note="Description of Artificial Sequence: Synthetic peptide"
GASTRAT

SEQ ID NO: 2448 - protein, 7 aa, Artificial Sequence
  source: /note="Description of Artificial Sequence: Synthetic peptide"
GASTRAT

SEQ ID NO: 2449 - protein, 7 aa, Artificial Sequence
  source: /note="Description of Artificial Sequence: Synthetic peptide"
GASTRAT

SEQ ID NO: 2450 - protein, 10 aa, Artificial Sequence
  source: /note="Description of Artificial Sequence: Synthetic peptide"
QQYVVWPPLT

SEQ ID NO: 2451 - protein, 10 aa, Artificial Sequence
  source: /note="Description of Artificial Sequence: Synthetic peptide"
QQYVVWPPLT

SEQ ID NO: 2452 - protein, 10 aa, Artificial Sequence
  source: /note="Description of Artificial Sequence: Synthetic peptide"
QQYVVWPPLT

SEQ ID NO: 2453 - protein, 9 aa, Artificial Sequence
  source: /note="Description of Artificial Sequence: Synthetic peptide"
QQYIVFPWT

SEQ ID NO: 2454 - protein, 9 aa, Artificial Sequence
  source: /note="Description of Artificial Sequence: Synthetic peptide"
QQYIVFPWT

SEQ ID NO: 2455 - protein, 9 aa, Artificial Sequence
  source: /note="Description of Artificial Sequence: Synthetic peptide"
QQYIVFPWT

SEQ ID NO: 2456 - protein, 108 aa, Artificial Sequence; identical to SEQ ID NO: 2412
  source: /note="Description of Artificial Sequence: Synthetic polypeptide"

SEQ ID NO: 2457 - protein, 108 aa, Artificial Sequence; identical to SEQ ID NO: 2412
  source: /note="Description of Artificial Sequence: Synthetic polypeptide"

SEQ ID NO: 2458 - protein, 108 aa, Artificial Sequence; identical to SEQ ID NO: 2412
  source: /note="Description of Artificial Sequence: Synthetic polypeptide"

SEQ ID NO: 2459 - protein, 107 aa, Artificial Sequence
  source: /note="Description of Artificial Sequence: Synthetic polypeptide"
EIVMTQSPATLSVSPGERATLSCRASQSVSSNLAWYQQKPGQAPRHLIYGASTRATGIPARFSGSGSGTEFTLTISSLQSEDFAVYYCQQYIVFPWTFGGGTKVEIK

SEQ ID NO: 2460 - protein, 107 aa, Artificial Sequence; identical to SEQ ID NO: 2459
  source: /note="Description of Artificial Sequence: Synthetic polypeptide"

SEQ ID NO: 2461 - protein, 107 aa, Artificial Sequence; identical to SEQ ID NO: 2459
  source: /note="Description of Artificial Sequence: Synthetic polypeptide"

SEQ ID NO: 2462 - protein, 127 aa, Artificial Sequence
  source: /note="Description of Artificial Sequence: Synthetic polypeptide"
EVQLQESGPGLVKPSQSLSLTCSVTGSSIASDYWGWIRKFPGNKMEWMGFITYSGSTSYNPSLKSRISITRDTSKNQFFLQLHSVTTDDTATYSCARMPSFITLASLSTWEGYFDFWGPGTMVTVSS

SEQ ID NO: 2463 - protein, 5 aa, Artificial Sequence
  source: /note="Description of Artificial Sequence: Synthetic peptide"
SDYWG

SEQ ID NO: 2464 - protein, 16 aa, Artificial Sequence
  source: /note="Description of Artificial Sequence: Synthetic peptide"
FITYSGSTSYNPSLKS

SEQ ID NO: 2465 - protein, 19 aa, Artificial Sequence
  source: /note="Description of Artificial Sequence: Synthetic peptide"
MPSFITLASLSTWEGYFDF

SEQ ID NO: 2466 - protein, 106 aa, Artificial Sequence
  source: /note="Description of Artificial Sequence: Synthetic polypeptide"
DIQMTQSPSLLSASVGDRVTLNCKASQSIHKNLAWYQQKLGEAPKFLIYYANSLQTGIPSRFSGSGSGTDFTLTISGLQPEDVATYFCQQYYSGWTFGGGTKVELK

SEQ ID NO: 2467 - protein, 11 aa, Artificial Sequence
  source: /note="Description of Artificial Sequence: Synthetic peptide"
KASQSIHKNLA

SEQ ID NO: 2468 - protein, 7 aa, Artificial Sequence
  source: /note="Description of Artificial Sequence: Synthetic peptide"
YANSLQT

SEQ ID NO: 2469 - protein, 8 aa, Artificial Sequence
  source: /note="Description of Artificial Sequence: Synthetic peptide"
QQYYSGWT

SEQ ID NO: 2470 - protein, 127 aa, Artificial Sequence
  source: /note="Description of Artificial Sequence: Synthetic polypeptide"
EVQLQESGPGLVKPSETLSLTCTVSGGSISSDYWGWIRQPPGKGLEWIGFITYSGSTSYNPSLKSRVTISVDTSKNQFSLKLSSVTAADTAVYYCARMPSFITLASLSTWEGYFDFWGQGTMVTVSS

SEQ ID NO: 2471 - protein, 4 aa, Artificial Sequence
  source: /note="Description of Artificial Sequence: Synthetic peptide"
DYWG

SEQ ID NO: 2472 - protein, 16 aa, Artificial Sequence
  source: /note="Description of Artificial Sequence: Synthetic peptide"
FITYSGSTSYNPSLKS

SEQ ID NO: 2473 - protein, 19 aa, Artificial Sequence
  source: /note="Description of Artificial Sequence: Synthetic peptide"
MPSFITLASLSTWEGYFDF

SEQ ID NO: 2474 - protein, 127 aa, Artificial Sequence
  source: /note="Description of Artificial Sequence: Synthetic polypeptide"
EVQLQESGPGLVKPSETLSLTCTVSGGSISSDYWGWIRQPPGKGLEWIGFITYSGSTSYNPSLKSRVTISRDTSKNQFSLKLSSVTAADTAVYYCARMPSFITLASLSTWEGYFDFWGQGTMVTVSS

SEQ ID NO: 2475 - protein, 5 aa, Artificial Sequence
  source: /note="Description of Artificial Sequence: Synthetic peptide"
SDYWG

SEQ ID NO: 2476 - protein, 16 aa, Artificial Sequence
  source: /note="Description of Artificial Sequence: Synthetic peptide"
FITYSGSTSYNPSLKS

SEQ ID NO: 2477 - protein, 19 aa, Artificial Sequence
  source: /note="Description of Artificial Sequence: Synthetic peptide"
MPSFITLASLSTWEGYFDF

SEQ ID NO: 2478 - protein, 127 aa, Artificial Sequence
  source: /note="Description of Artificial Sequence: Synthetic polypeptide"
EVQLQESGPGLVKPSETLSLTCTVSGGSISSDYWGWIRQPPGKGLEWIGFITYSGSTSYNPSLKSRITISRDTSKNQFSLKLSSVTAADTAVYYCARMPSFITLASLSTWEGYFDFWGQGTMVTVSS

SEQ ID NO: 2479 - protein, 5 aa, Artificial Sequence
  source: /note="Description of Artificial Sequence: Synthetic peptide"
SDYWG

SEQ ID NO: 2480 - protein, 16 aa, Artificial Sequence
  source: /note="Description of Artificial Sequence: Synthetic peptide"
FITYSGSTSYNPSLKS

SEQ ID NO: 2481 - protein, 19 aa, Artificial Sequence
  source: /note="Description of Artificial Sequence: Synthetic peptide"
MPSFITLASLSTWEGYFDF

SEQ ID NO: 2482 - protein, 127 aa, Artificial Sequence
  source: /note="Description of Artificial Sequence: Synthetic polypeptide"
EVQLQESGPGLVKPSETLSLTCTVSGSSISSDYWGWIRQPPGKGLEWMGFITYSGSTSYNPSLKSRITISRDTSKNQFSLKLSSVTAADTAVYYCARMPSFITLASLSTWEGYFDFWGQGTMVTVSS

SEQ ID NO: 2483 - protein, 5 aa, Artificial Sequence
  source: /note="Description of Artificial Sequence: Synthetic peptide"
SDYWG

SEQ ID NO: 2484 - protein, 16 aa, Artificial Sequence
  source: /note="Description of Artificial Sequence: Synthetic peptide"
FITYSGSTSYNPSLKS

SEQ ID NO: 2485 - protein, 19 aa, Artificial Sequence
  source: /note="Description of Artificial Sequence: Synthetic peptide"
MPSFITLASLSTWEGYFDF

SEQ ID NO: 2486 - protein, 127 aa, Artificial Sequence
  source: /note="Description of Artificial Sequence: Synthetic polypeptide"
EVQLQESGPGLVKPSETLSLTCTVSGGSISSDYWGWIRQPPGKGLEWIGFITYSGSTSYNPSLKSRVTISRDTSKNQFSLKLHSVTAADTAVYYCARMPSFITLASLSTWEGYFDFWGQGTMVTVSS

SEQ ID NO: 2487 - protein, 5 aa, Artificial Sequence
  source: /note="Description of Artificial Sequence: Synthetic peptide"
SDYWG

SEQ ID NO: 2488 - protein, 16 aa, Artificial Sequence
  source: /note="Description of Artificial Sequence: Synthetic peptide"
FITYSGSTSYNPSLKS

SEQ ID NO: 2489 - protein, 19 aa, Artificial Sequence
  source: /note="Description of Artificial Sequence: Synthetic peptide"
MPSFITLASLSTWEGYFDF

SEQ ID NO: 2490 - protein, 127 aa, Artificial Sequence
  source: /note="Description of Artificial Sequence: Synthetic polypeptide"
EVQLQESGPGLVKPSETLSLTCTVSGGSISSDYWGWIRQPPGKGLEWIGFITYSGSTSYNPSLKSRITISRDTSKNQFSLKLHSVTAADTAVYYCARMPSFITLASLSTWEGYFDFWGQGTMVTVSS

SEQ ID NO: 2491 - protein, 5 aa, Artificial Sequence
  source: /note="Description of Artificial Sequence: Synthetic peptide"
SDYWG

SEQ ID NO: 2492 - protein, 17 aa, Artificial Sequence
  source: /note="Description of Artificial Sequence: Synthetic peptide"
GFITYSGSTSYNPSLKS

SEQ ID NO: 2493 - protein, 19 aa, Artificial Sequence
  source: /note="Description of Artificial Sequence: Synthetic peptide"
MPSFITLASLSTWEGYFDF

SEQ ID NO: 2494 - protein, 127 aa, Artificial Sequence
  source: /note="Description of Artificial Sequence: Synthetic polypeptide"
EVQLQESGPGLVKPSETLSLTCTVSGSSISSDYWGWIRQPPGKGLEWIGFITYSGSTSYNPSLKSRITISRDTSKNQFSLKLHSVTAADTAVYYCARMPSFITLASLSTWEGYFDFWGQGTMVTVSS

SEQ ID NO: 2495 - protein, 5 aa, Artificial Sequence
  source: /note="Description of Artificial Sequence: Synthetic peptide"
SDYWG

SEQ ID NO: 2496 - protein, 16 aa, Artificial Sequence
  source: /note="Description of Artificial Sequence: Synthetic peptide"
FITYSGSTSYNPSLKS

SEQ ID NO: 2497 - protein, 19 aa, Artificial Sequence
  source: /note="Description of Artificial Sequence: Synthetic peptide"
MPSFITLASLSTWEGYFDF

SEQ ID NO: 2498 - protein, 127 aa, Artificial Sequence
  source: /note="Description of Artificial Sequence: Synthetic polypeptide"
EVQLQESGPGLVKPSETLSLTCTVSGSSISSDYWGWIRQPPGKGLEWMGFITYSGSTSYNPSLKSRITISVDTSKNQFSLKLHSVTAADTAVYYCARMPSFITLASLSTWEGYFDFWGQGTMVTVSS

SEQ ID NO: 2499 - protein, 5 aa, Artificial Sequence
  source: /note="Description of Artificial Sequence: Synthetic peptide"
SDYWG

SEQ ID NO: 2500 - protein, 16 aa, Artificial Sequence
  source: /note="Description of Artificial Sequence: Synthetic peptide"
FITYSGSTSYNPSLKS

SEQ ID NO: 2501 - protein, 19 aa, Artificial Sequence
  source: /note="Description of Artificial Sequence: Synthetic peptide"
MPSFITLASLSTWEGYFDF

SEQ ID NO: 2502 - protein, 127 aa, Artificial Sequence
  source: /note="Description of Artificial Sequence: Synthetic polypeptide"
EVQLQESGPGLVKPSETLSLTCAVSGYSISSDYWGWIRQPPGKGLEWIGFITYSGSTSYNPSLKSRVTISVDTSKNQFSLKLSSVTAADTAVYYCARMPSFITLASLSTWEGYFDFWGQGTMVTVSS

SEQ ID NO: 2503 - protein, 5 aa, Artificial Sequence
  source: /note="Description of Artificial Sequence: Synthetic peptide"
SDYWG

SEQ ID NO: 2504 - protein, 16 aa, Artificial Sequence
  source: /note="Description of Artificial Sequence: Synthetic peptide"
FITYSGSTSYNPSLKS

SEQ ID NO: 2505 - protein, 19 aa, Artificial Sequence
  source: /note="Description of Artificial Sequence: Synthetic peptide"
MPSFITLASLSTWEGYFDF

SEQ ID NO: 2506 - protein, 127 aa, Artificial Sequence
  source: /note="Description of Artificial Sequence: Synthetic polypeptide"
EVQLQESGPGLVKPSETLSLTCAVSGYSISSDYWGWIRQPPGKGLEWIGFITYSGSTSYNPSLKSRVTISRDTSKNQFSLKLSSVTAADTAVYYCARMPSFITLASLSTWEGYFDFWGQGTMVTVSS

SEQ ID NO: 2507 - protein, 5 aa, Artificial Sequence
  source: /note="Description of Artificial Sequence: Synthetic peptide"
SDYWG

SEQ ID NO: 2508 - protein, 16 aa, Artificial Sequence
  source: /note="Description of Artificial Sequence: Synthetic peptide"
FITYSGSTSYNPSLKS

SEQ ID NO: 2509 - protein, 19 aa, Artificial Sequence
  source: /note="Description of Artificial Sequence: Synthetic peptide"
MPSFITLASLSTWEGYFDF

SEQ ID NO: 2510 - protein, 127 aa, Artificial Sequence
  source: /note="Description of Artificial Sequence: Synthetic polypeptide"
EVQLQESGPGLVKPSETLSLTCAVSGYSISSDYWGWIRQPPGKGLEWIGFITYSGSTSYNPSLKSRITISRDTSKNQFSLKLSSVTAADTAVYYCARMPSFITLASLSTWEGYFDFWGQGTMVTVSS

SEQ ID NO: 2511 - protein, 5 aa, Artificial Sequence
  source: /note="Description of Artificial Sequence: Synthetic peptide"
SDYWG

SEQ ID NO: 2512 - protein, 16 aa, Artificial Sequence
  source: /note="Description of Artificial Sequence: Synthetic peptide"
FITYSGSTSYNPSLKS

SEQ ID NO: 2513 - protein, 19 aa, Artificial Sequence
  source: /note="Description of Artificial Sequence: Synthetic peptide"
MPSFITLASLSTWEGYFDF

SEQ ID NO: 2514 - protein, 127 aa, Artificial Sequence
  source: /note="Description of Artificial Sequence: Synthetic polypeptide"
EVQLQESGPGLVKPSETLSLTCAVSGSSISSDYWGWIRQPPGKGLEWMGFITYSGSTSYNPSLKSRITISRDTSKNQFSLKLSSVTAADTAVYYCARMPSFITLASLSTWEGYFDFWGQGTMVTVSS

SEQ ID NO: 2515 - protein, 5 aa, Artificial Sequence
  source: /note="Description of Artificial Sequence: Synthetic peptide"
SDYWG

SEQ ID NO: 2516 - protein, 16 aa, Artificial Sequence
  source: /note="Description of Artificial Sequence: Synthetic peptide"
FITYSGSTSYNPSLKS

SEQ ID NO: 2517 - protein, 19 aa, Artificial Sequence
  source: /note="Description of Artificial Sequence: Synthetic peptide"
MPSFITLASLSTWEGYFDF

SEQ ID NO: 2518 - protein, 127 aa, Artificial Sequence
  source: /note="Description of Artificial Sequence: Synthetic polypeptide"
EVQLQESGPGLVKPSETLSLTCAVSGYSISSDYWGWIRQPPGKGLEWIGFITYSGSTSYNPSLKSRVTISRDTSKNQFSLKLHSVTAADTAVYYCARMPSFITLASLSTWEGYFDFWGQGTMVTVSS

SEQ ID NO: 2519 - protein, 5 aa, Artificial Sequence
  source: /note="Description of Artificial Sequence: Synthetic peptide"
SDYWG

SEQ ID NO: 2520 - protein, 16 aa, Artificial Sequence
  source: /note="Description of Artificial Sequence: Synthetic peptide"
FITYSGSTSYNPSLKS

SEQ ID NO: 2521 - protein, 19 aa, Artificial Sequence
  source: /note="Description of Artificial Sequence: Synthetic peptide"
MPSFITLASLSTWEGYFDF

SEQ ID NO: 2522 - protein, 127 aa, Artificial Sequence
  source: /note="Description of Artificial Sequence: Synthetic polypeptide"
EVQLQESGPGLVKPSETLSLTCAVSGYSISSDYWGWIRQPPGKGLEWIGFITYSGSTSYNPSLKSRITISRDTSKNQFSLKLHSVTAADTAVYYCARMPSFITLASLSTWEGYFDFWGQGTMVTVSS

SEQ ID NO: 2523 - protein, 5 aa, Artificial Sequence
  source: /note="Description of Artificial Sequence: Synthetic peptide"
SDYWG

SEQ ID NO: 2524 - protein, 16 aa, Artificial Sequence
  source: /note="Description of Artificial Sequence: Synthetic peptide"
FITYSGSTSYNPSLKS

SEQ ID NO: 2525 - protein, 19 aa, Artificial Sequence
  source: /note="Description of Artificial Sequence: Synthetic peptide"
MPSFITLASLSTWEGYFDF

SEQ ID NO: 2526 - protein, 129 aa, Artificial Sequence
  source: /note="Description of Artificial Sequence: Synthetic polypeptide"
EVQLQESGPGLVKPSETLSLTCTVSGSSIASDYWGWIRQPPGKGLEWIGFITYSGSTSYNPSLKSRVTISVDTSKNQFSLKLSSVTAADTAVYYCARMPSFITLASLSTWEGYFDFWGQGTMVTVSSAS

SEQ ID NO: 2527 - protein, 5 aa, Artificial Sequence
  source: /note="Description of Artificial Sequence: Synthetic peptide"
SDYWG

SEQ ID NO: 2528 - protein, 16 aa, Artificial Sequence
  source: /note="Description of Artificial Sequence: Synthetic peptide"
FITYSGSTSYNPSLKS

SEQ ID NO: 2529 - protein, 19 aa, Artificial Sequence
  source: /note="Description of Artificial Sequence: Synthetic peptide"
MPSFITLASLSTWEGYFDF

SEQ ID NO: 2530 - protein, 127 aa, Artificial Sequence
  source: /note="Description of Artificial Sequence: Synthetic polypeptide"
EVQLQESGPGLVKPSETLSLTCTVSGSSIASDYWGWIRQPPGKGLEWIGFITYSGSTSYNPSLKSRVTISRDTSKNQFSLKLSSVTAADTAVYYCARMPSFITLASLSTWEGYFDFWGQGTMVTVSS

SEQ ID NO: 2531 - protein, 5 aa, Artificial Sequence
  source: /note="Description of Artificial Sequence: Synthetic peptide"
SDYWG

SEQ ID NO: 2532 - protein, 16 aa, Artificial Sequence
  source: /note="Description of Artificial Sequence: Synthetic peptide"
FITYSGSTSYNPSLKS

SEQ ID NO: 2533 - protein, 19 aa, Artificial Sequence
  source: /note="Description of Artificial Sequence: Synthetic peptide"
MPSFITLASLSTWEGYFDF

SEQ ID NO: 2534 - protein, 127 aa, Artificial Sequence
  source: /note="Description of Artificial Sequence: Synthetic polypeptide"
EVQLQESGPGLVKPSETLSLTCTVSGSSIASDYWGWIRKPPGKGLEWIGFITYSGSTSYNPSLKSRVTISRDTSKNQFSLKLSSVTAADTAVYYCARMPSFITLASLSTWEGYFDFWGQGTMVTVSS

SEQ ID NO: 2535 - protein, 5 aa, Artificial Sequence
  source: /note="Description of Artificial Sequence: Synthetic peptide"
SDYWG

SEQ ID NO: 2536 - protein, 16 aa, Artificial Sequence
  source: /note="Description of Artificial Sequence: Synthetic peptide"
FITYSGSTSYNPSLKS

SEQ ID NO: 2537 - protein, 19 aa, Artificial Sequence
  source: /note="Description of Artificial Sequence: Synthetic peptide"
MPSFITLASLSTWEGYFDF

SEQ ID NO: 2538 - protein, 127 aa, Artificial Sequence
  source: /note="Description of Artificial Sequence: Synthetic polypeptide"
EVQLQESGPGLVKPSETLSLTCTVSGSSIASDYWGWIRQPPGKKLEWIGFITYSGSTSYNPSLKSRVTISRDTSKNQFSLKLSSVTAADTAVYYCARMPSFITLASLSTWEGYFDFWGQGTMVTVSS

SEQ ID NO: 2539 - protein, 5 aa, Artificial Sequence
  source: /note="Description of Artificial Sequence: Synthetic peptide"
SDYWG

SEQ ID NO: 2540 - protein, 16 aa, Artificial Sequence
  source: /note="Description of Artificial Sequence: Synthetic peptide"
FITYSGSTSYNPSLKS

SEQ ID NO: 2541 - protein, 19 aa, Artificial Sequence
  source: /note="Description of Artificial Sequence: Synthetic peptide"
MPSFITLASLSTWEGYFDF

SEQ ID NO: 2542 - protein, 119 aa, Artificial Sequence; identical to SEQ ID NO: 2042
  source: /note="Description of Artificial Sequence: Synthetic polypeptide"

SEQ ID NO: 2543 - protein, 10 aa, Artificial Sequence
  source: /note="Description of Artificial Sequence: Synthetic peptide"
GYTITNYGMN

SEQ ID NO: 2544 - protein, 10 aa, Artificial Sequence
  source: /note="Description of Artificial Sequence: Synthetic peptide"
WINTYTGEPT

SEQ ID NO: 2545 - protein, 10 aa, Artificial Sequence
  source: /note="Description of Artificial Sequence: Synthetic peptide"
GNGNPLGMDY

SEQ ID NO: 2546 - protein, 446 aa, Artificial Sequence; identical to SEQ ID NO: 2046
  source: /note="Description of Artificial Sequence: Synthetic polypeptide"

SEQ ID NO: 2547 - protein, 106 aa, Artificial Sequence; identical to SEQ ID NO: 2047
  source: /note="Description of Artificial Sequence: Synthetic polypeptide"

SEQ ID NO: 2548 - protein, 10 aa, Artificial Sequence
  source: /note="Description of Artificial Sequence: Synthetic peptide"
GNGNPLGMDY

SEQ ID NO: 2549 - protein, 7 aa, Artificial Sequence
  source: /note="Description of Artificial Sequence: Synthetic peptide"
DTSKLAS

SEQ ID NO: 2550 - protein, 9 aa, Artificial Sequence
  source: /note="Description of Artificial Sequence: Synthetic peptide"
FQGSGYPLT

SEQ ID NO: 2551 - protein, 213 aa, Artificial Sequence; identical to SEQ ID NO: 2051
  source: /note="Description of Artificial Sequence: Synthetic polypeptide"

SEQ ID NO: 2552 - protein, 119 aa, Artificial Sequence; identical to SEQ ID NO: 2042
  source: /note="Description of Artificial Sequence: Synthetic polypeptide"

SEQ ID NO: 2553 - protein, 10 aa, Artificial Sequence
  source: /note="Description of Artificial Sequence: Synthetic peptide"
GYTITNYGMN

SEQ ID NO: 2554 - protein, 10 aa, Artificial Sequence
  source: /note="Description of Artificial Sequence: Synthetic peptide"
WINTYTGEPT

SEQ ID NO: 2555 - protein, 10 aa, Artificial Sequence
  source: /note="Description of Artificial Sequence: Synthetic peptide"
GNGNPLGMDY

SEQ ID NO: 2556 - protein, 446 aa, Artificial Sequence; identical to SEQ ID NO: 2046
  source: /note="Description of Artificial Sequence: Synthetic polypeptide"

SEQ ID NO: 2557 - protein, 106 aa, Artificial Sequence; identical to SEQ ID NO: 2057
  source: /note="Description of Artificial Sequence: Synthetic polypeptide"

SEQ ID NO: 2558 - protein, 10 aa, Artificial Sequence
  source: /note="Description of Artificial Sequence: Synthetic peptide"
GNGNPLGMDY

SEQ ID NO: 2559 - protein, 7 aa, Artificial Sequence
  source: /note="Description of Artificial Sequence: Synthetic peptide"
DTSKLAS

SEQ ID NO: 2560 - protein, 9 aa, Artificial Sequence
  source: /note="Description of Artificial Sequence: Synthetic peptide"
FQGSGYPLT

SEQ ID NO: 2561 - protein, 213 aa, Artificial Sequence; identical to SEQ ID NO: 2061
  source: /note="Description of Artificial Sequence: Synthetic polypeptide"

SEQ ID NO: 2562 - protein, 119 aa, Artificial Sequence; identical to SEQ ID NO: 2042
  source: /note="Description of Artificial Sequence: Synthetic polypeptide"

SEQ ID NO: 2563 - protein, 10 aa, Artificial Sequence
  source: /note="Description of Artificial Sequence: Synthetic peptide"
GYTITNYGMN

SEQ ID NO: 2564 - protein, 10 aa, Artificial Sequence
  source: /note="Description of Artificial Sequence: Synthetic peptide"
WINTYTGEPT

SEQ ID NO: 2565 - protein, 10 aa, Artificial Sequence
  source: /note="Description of Artificial Sequence: Synthetic peptide"
GNGNPLGMDY

SEQ ID NO: 2566 - protein, 446 aa, Artificial Sequence; identical to SEQ ID NO: 2046
  source: /note="Description of Artificial Sequence: Synthetic polypeptide"

SEQ ID NO: 2567 - protein, 106 aa, Artificial Sequence; identical to SEQ ID NO: 2067
  source: /note="Description of Artificial Sequence: Synthetic polypeptide"

SEQ ID NO: 2568 - protein, 10 aa, Artificial Sequence
  source: /note="Description of Artificial Sequence: Synthetic peptide"
GNGNPLGMDY

SEQ ID NO: 2569 - protein, 7 aa, Artificial Sequence
  source: /note="Description of Artificial Sequence: Synthetic peptide"
DTSKLAS

SEQ ID NO: 2570 - protein, 9 aa, Artificial Sequence
  source: /note="Description of Artificial Sequence: Synthetic peptide"
FQGSGYPLT

SEQ ID NO: 2571 - protein, 213 aa, Artificial Sequence; identical to SEQ ID NO: 2071
  source: /note="Description of Artificial Sequence: Synthetic polypeptide"

SEQ ID NO: 2572 - protein, 119 aa, Artificial Sequence; identical to SEQ ID NO: 2072
  source: /note="Description of Artificial Sequence: Synthetic polypeptide"

SEQ ID NO: 2573 - protein, 10 aa, Artificial Sequence
  source: /note="Description of Artificial Sequence: Synthetic peptide"
GYTITNYGMN

SEQ ID NO: 2574 - protein, 10 aa, Artificial Sequence
  source: /note="Description of Artificial Sequence: Synthetic peptide"
WINTYTGEPT

SEQ ID NO: 2575 - protein, 10 aa, Artificial Sequence
  source: /note="Description of Artificial Sequence: Synthetic peptide"
GNGNPLGMDY

SEQ ID NO: 2576 - protein, 446 aa, Artificial Sequence; identical to SEQ ID NO: 2076
  source: /note="Description of Artificial Sequence: Synthetic polypeptide"

SEQ ID NO: 2577 - protein, 106 aa, Artificial Sequence; identical to SEQ ID NO: 2047
  source: /note="Description of Artificial Sequence: Synthetic polypeptide"

SEQ ID NO: 2578 - protein, 10 aa, Artificial Sequence
  source: /note="Description of Artificial Sequence: Synthetic peptide"
GNGNPLGMDY

SEQ ID NO: 2579 - protein, 7 aa, Artificial Sequence
  source: /note="Description of Artificial Sequence: Synthetic peptide"
DTSKLAS

SEQ ID NO: 2580 - protein, 9 aa, Artificial Sequence
  source: /note="Description of Artificial Sequence: Synthetic peptide"
FQGSGYPLT

SEQ ID NO: 2581 - protein, 213 aa, Artificial Sequence; identical to SEQ ID NO: 2051
  source: /note="Description of Artificial Sequence: Synthetic polypeptide"

SEQ ID NO: 2582 - protein, 119 aa, Artificial Sequence; identical to SEQ ID NO: 2072
  source: /note="Description of Artificial Sequence: Synthetic polypeptide"

SEQ ID NO: 2583 - protein, 10 aa, Artificial Sequence
  source: /note="Description of Artificial Sequence: Synthetic peptide"
GYTITNYGMN

SEQ ID NO: 2584 - protein, 10 aa, Artificial Sequence
  source: /note="Description of Artificial Sequence: Synthetic peptide"
WINTYTGEPT

SEQ ID NO: 2585 - protein, 10 aa, Artificial Sequence
  source: /note="Description of Artificial Sequence: Synthetic peptide"
GNGNPLGMDY

SEQ ID NO: 2586 - protein, 446 aa, Artificial Sequence; identical to SEQ ID NO: 2076
  source: /note="Description of Artificial Sequence: Synthetic polypeptide"

SEQ ID NO: 2587 - protein, 106 aa, Artificial Sequence; identical to SEQ ID NO: 2057
  source: /note="Description of Artificial Sequence: Synthetic polypeptide"

SEQ ID NO: 2588 - protein, 10 aa, Artificial Sequence
  source: /note="Description of Artificial Sequence: Synthetic peptide"
GNGNPLGMDY

SEQ ID NO: 2589 - protein, 7 aa, Artificial Sequence
  source: /note="Description of Artificial Sequence: Synthetic peptide"
DTSKLAS

SEQ ID NO: 2590 - protein, 9 aa, Artificial Sequence
  source: /note="Description of Artificial Sequence: Synthetic peptide"
FQGSGYPLT

SEQ ID NO: 2591 - protein, 213 aa, Artificial Sequence; identical to SEQ ID NO: 2061
  source: /note="Description of Artificial Sequence: Synthetic polypeptide"

SEQ ID NO: 2592 - protein, 119 aa, Artificial Sequence; identical to SEQ ID NO: 2072
  source: /note="Description of Artificial Sequence: Synthetic polypeptide"

SEQ ID NO: 2593 - protein, 10 aa, Artificial Sequence
  source: /note="Description of Artificial Sequence: Synthetic peptide"
GYTITNYGMN

SEQ ID NO: 2594 - protein, 10 aa, Artificial Sequence
  source: /note="Description of Artificial Sequence: Synthetic peptide"
WINTYTGEPT

SEQ ID NO: 2595 - protein, 10 aa, Artificial Sequence
  source: /note="Description of Artificial Sequence: Synthetic peptide"
GNGNPLGMDY

SEQ ID NO: 2596 - protein, 446 aa, Artificial Sequence; identical to SEQ ID NO: 2076
  source: /note="Description of Artificial Sequence: Synthetic polypeptide"

SEQ ID NO: 2597 - protein, 106 aa, Artificial Sequence; identical to SEQ ID NO: 2067
  source: /note="Description of Artificial Sequence: Synthetic polypeptide"

SEQ ID NO: 2598 - protein, 10 aa, Artificial Sequence
  source: /note="Description of Artificial Sequence: Synthetic peptide"
GNGNPLGMDY

SEQ ID NO: 2599 - protein, 7 aa, Artificial Sequence
  source: /note="Description of Artificial Sequence: Synthetic peptide"
DTSKLAS

SEQ ID NO: 2600 - protein, 9 aa, Artificial Sequence
  source: /note="Description of Artificial Sequence: Synthetic peptide"
FQGSGYPLT

SEQ ID NO: 2601 - protein, 213 aa, Artificial Sequence; identical to SEQ ID NO: 2071
  source: /note="Description of Artificial Sequence: Synthetic polypeptide"

SEQ ID NO: 2602 - protein, 119 aa, Artificial Sequence; identical to SEQ ID NO: 1952
  source: /note="Description of Artificial Sequence: Synthetic polypeptide"

SEQ ID NO: 2603 - protein, 10 aa, Artificial Sequence
  source: /note="Description of Artificial Sequence: Synthetic peptide"
GFTFSSYIMS

SEQ ID NO: 2604 - protein, 10 aa, Artificial Sequence
  source: /note="Description of Artificial Sequence: Synthetic peptide"
TISGGGTNTY

SEQ ID NO: 2605 - protein, 10 aa, Artificial Sequence
  source: /note="Description of Artificial Sequence: Synthetic peptide"
WLLSYYAMDY

SEQ ID NO: 2606 - protein, 446 aa, Artificial Sequence; identical to SEQ ID NO: 1956
  source: /note="Description of Artificial Sequence: Synthetic polypeptide"

SEQ ID NO: 2607 - protein, 107 aa, Artificial Sequence; identical to SEQ ID NO: 2107
  source: /note="Description of Artificial Sequence: Synthetic polypeptide"

SEQ ID NO: 2608 - protein, 11 aa, Artificial Sequence
  source: /note="Description of Artificial Sequence: Synthetic peptide"
RASQNINVWLS

SEQ ID NO: 2609 - protein, 7 aa, Artificial Sequence
  source: /note="Description of Artificial Sequence: Synthetic peptide"
KASKSHT

SEQ ID NO: 2610 - protein, 9 aa, Artificial Sequence
  source: /note="Description of Artificial Sequence: Synthetic peptide"
QQGQSYPYT

SEQ ID NO: 2611 - protein, 214 aa, Artificial Sequence; identical to SEQ ID NO: 2111
  source: /note="Description of Artificial Sequence: Synthetic polypeptide"

SEQ ID NO: 2612 - protein, 119 aa, Artificial Sequence; identical to SEQ ID NO: 1952
  source: /note="Description of Artificial Sequence: Synthetic polypeptide"

SEQ ID NO: 2613 - protein, 10 aa, Artificial Sequence
  source: /note="Description of Artificial Sequence: Synthetic peptide"
GFTFSSYIMS

SEQ ID NO: 2614 - protein, 10 aa, Artificial Sequence
  source: /note="Description of Artificial Sequence: Synthetic peptide"
TISGGGTNTY

SEQ ID NO: 2615 - protein, 10 aa, Artificial Sequence
  source: /note="Description of Artificial Sequence: Synthetic peptide"
WLLSYYAMDY

SEQ ID NO: 2616 - protein, 446 aa, Artificial Sequence; identical to SEQ ID NO: 1956
  source: /note="Description of Artificial Sequence: Synthetic polypeptide"

SEQ ID NO: 2617 - protein, 107 aa, Artificial Sequence; identical to SEQ ID NO: 1659
  source: /note="Description of Artificial Sequence: Synthetic polypeptide"

SEQ ID NO: 2618 - protein, 11 aa, Artificial Sequence
  source: /note="Description of Artificial Sequence: Synthetic peptide"
RASQNINVWLS

SEQ ID NO: 2619 - protein, 7 aa, Artificial Sequence
  source: /note="Description of Artificial Sequence: Synthetic peptide"
KASKSHT

SEQ ID NO: 2620 - protein, 9 aa, Artificial Sequence
  source: /note="Description of Artificial Sequence: Synthetic peptide"
QQGQSYPYT

SEQ ID NO: 2621 - protein, 214 aa, Artificial Sequence; identical to SEQ ID NO: 1663
  source: /note="Description of Artificial Sequence: Synthetic polypeptide"

SEQ ID NO: 2622 - protein, 119 aa, Artificial Sequence; identical to SEQ ID NO: 1654
  source: /note="Description of Artificial Sequence: Synthetic polypeptide"

SEQ ID NO: 2623 - protein, 10 aa, Artificial Sequence
  source: /note="Description of Artificial Sequence: Synthetic peptide"
GFTFSSYIMS

SEQ ID NO: 2624 - protein, 10 aa, Artificial Sequence
  source: /note="Description of Artificial Sequence: Synthetic peptide"
TISGGGTNTY

SEQ ID NO: 2625 - protein, 10 aa, Artificial Sequence
  source: /note="Description of Artificial Sequence: Synthetic peptide"
WLLSYYAMDY

SEQ ID NO: 2626 - protein, 446 aa, Artificial Sequence; identical to SEQ ID NO: 1658
  source: /note="Description of Artificial Sequence: Synthetic polypeptide"

SEQ ID NO: 2627 - protein, 107 aa, Artificial Sequence; identical to SEQ ID NO: 2107
  source: /note="Description of Artificial Sequence: Synthetic polypeptide"

SEQ ID NO: 2628 - protein, 11 aa, Artificial Sequence
  source: /note="Description of Artificial Sequence: Synthetic peptide"
RASQNINVWLS

SEQ ID NO: 2629 - protein, 7 aa, Artificial Sequence
  source: /note="Description of Artificial Sequence: Synthetic peptide"
KASKSHT

SEQ ID NO: 2630 - protein, 9 aa, Artificial Sequence
  source: /note="Description of Artificial Sequence: Synthetic peptide"
QQGQSYPYT

SEQ ID NO: 2631 - protein, 214 aa, Artificial Sequence; identical to SEQ ID NO: 2111
  source: /note="Description of Artificial Sequence: Synthetic polypeptide"

SEQ ID NO: 2632 - protein, 119 aa, Artificial Sequence; identical to SEQ ID NO: 1654
  source: /note="Description of Artificial Sequence: Synthetic polypeptide"

SEQ ID NO: 2633 - protein, 10 aa, Artificial Sequence
  source: /note="Description of Artificial Sequence: Synthetic peptide"
GFTFSSYIMS

SEQ ID NO: 2634 - protein, 10 aa, Artificial Sequence
  source: /note="Description of Artificial Sequence: Synthetic peptide"
TISGGGTNTY

SEQ ID NO: 2635 - protein, 10 aa, Artificial Sequence
  source: /note="Description of Artificial Sequence: Synthetic peptide"
WLLSYYAMDY

SEQ ID NO: 2636 - protein, 446 aa, Artificial Sequence; identical to SEQ ID NO: 1658
  source: /note="Description of Artificial Sequence: Synthetic polypeptide"

SEQ ID NO: 2637 - protein, 107 aa, Artificial Sequence; identical to SEQ ID NO: 1659
  source: /note="Description of Artificial Sequence: Synthetic polypeptide"

SEQ ID NO: 2638 - protein, 11 aa, Artificial Sequence
  source: /note="Description of Artificial Sequence: Synthetic peptide"
RASQNINVWLS

SEQ ID NO: 2639 - protein, 7 aa, Artificial Sequence
  source: /note="Description of Artificial Sequence: Synthetic peptide"
KASKSHT

SEQ ID NO: 2640 - protein, 9 aa, Artificial Sequence
  source: /note="Description of Artificial Sequence: Synthetic peptide"
QQGQSYPYT

SEQ ID NO: 2641 - protein, 214 aa, Artificial Sequence; identical to SEQ ID NO: 1663
  source: /note="Description of Artificial Sequence: Synthetic polypeptide"

SEQ ID NO: 2642 - protein, 117 aa, Artificial Sequence; identical to SEQ ID NO: 2142
  source: /note="Description of Artificial Sequence: Synthetic polypeptide"

SEQ ID NO: 2643 - protein, 10 aa, Artificial Sequence
  source: /note="Description of Artificial Sequence: Synthetic peptide"
GYSFTGYTMN

SEQ ID NO: 2644 - protein, 10 aa, Artificial Sequence
  source: /note="Description of Artificial Sequence: Synthetic peptide"
LIFPYNGGTS

SEQ ID NO: 2645 - protein, 8 aa, Artificial Sequence
  source: /note="Description of Artificial Sequence: Synthetic peptide"
GVRFALDY

SEQ ID NO: 2646 - protein, 112 aa, Artificial Sequence; identical to SEQ ID NO: 2146
  source: /note="Description of Artificial Sequence: Synthetic polypeptide"

SEQ ID NO: 2647 - protein, 16 aa, Artificial Sequence
  source: /note="Description of Artificial Sequence: Synthetic peptide"
RSSQSLANSYGNTYLS

SEQ ID NO: 2648 - protein, 7 aa, Artificial Sequence
  source: /note="Description of Artificial Sequence: Synthetic peptide"
EISNRFS

SEQ ID NO: 2649 - protein, 9 aa, Artificial Sequence
  source: /note="Description of Artificial Sequence: Synthetic peptide"
LQGTHQPWT

SEQ ID NO: 2650 - protein, 119 aa, Artificial Sequence; identical to SEQ ID NO: 1782
  source: /note="Description of Artificial Sequence: Synthetic polypeptide"

SEQ ID NO: 2651 - protein, 8 aa, Artificial Sequence
  source: /note="Description of Artificial Sequence: Synthetic peptide"
GYTFSSYV

SEQ ID NO: 2652 - protein, 8 aa, Artificial Sequence
  source: /note="Description of Artificial Sequence: Synthetic peptide"
IDPYNDGA

SEQ ID NO: 2653 - protein, 12 aa, Artificial Sequence
  source: /note="Description of Artificial Sequence: Synthetic peptide"
ARGGPYGWYFDV

SEQ ID NO: 2654 - protein, 443 aa, Artificial Sequence; identical to SEQ ID NO: 2154
  source: /note="Description of Artificial Sequence: Synthetic polypeptide"

SEQ ID NO: 2655 - protein, 107 aa, Artificial Sequence; identical to SEQ ID NO: 1787
  source: /note="Description of Artificial Sequence: Synthetic polypeptide"

SEQ ID NO: 2656 - protein, 6 aa, Artificial Sequence
  source: /note="Description of Artificial Sequence: Synthetic peptide"
EHIYSY

SEQ ID NO: 2657 - protein, 3 aa, Artificial Sequence
  source: /note="Description of Artificial Sequence: Synthetic peptide"
NAK

SEQ ID NO: 2658 - protein, 9 aa, Artificial Sequence
  source: /note="Description of Artificial Sequence: Synthetic peptide"
QHHFGSPLT

SEQ ID NO: 2659 - protein, 214 aa, Artificial Sequence; identical to SEQ ID NO: 2159
  source: /note="Description of Artificial Sequence: Synthetic polypeptide"

SEQ ID NO: 2660 - protein, 130 aa, Artificial Sequence; identical to SEQ ID NO: 1792
  source: /note="Description of Artificial Sequence: Synthetic polypeptide"

SEQ ID NO: 2661 - protein, 10 aa, Artificial Sequence
  source: /note="Description of Artificial Sequence: Synthetic peptide"
GGSVSSGIYY

SEQ ID NO: 2662 - protein, 7 aa, Artificial Sequence
  source: /note="Description of Artificial Sequence: Synthetic peptide"
IYYSGST

SEQ ID NO: 2663 - protein, 22 aa, Artificial Sequence
  source: /note="Description of Artificial Sequence: Synthetic peptide"
ARDYYVSGNYYNVDYYFFGVDV

SEQ ID NO: 2664 - protein, 454 aa, Artificial Sequence; identical to SEQ ID NO: 2164
  source: /note="Description of Artificial Sequence: Synthetic polypeptide"

SEQ ID NO: 2665 - protein, 109 aa, Artificial Sequence; identical to SEQ ID NO: 1797
  source: /note="Description of Artificial Sequence: Synthetic polypeptide"

SEQ ID NO: 2666 - protein, 6 aa, Artificial Sequence
  source: /note="Description of Artificial Sequence: Synthetic peptide"
QSVSSY

SEQ ID NO: 2667 - protein, 3 aa, Artificial Sequence
  source: /note="Description of Artificial Sequence: Synthetic peptide"
DAS

SEQ ID NO: 2668 - protein, 11 aa, Artificial Sequence
  source: /note="Description of Artificial Sequence: Synthetic peptide"
QQRSNWPPLFT

SEQ ID NO: 2669 - protein, 216 aa, Artificial Sequence; identical to SEQ ID NO: 2169
  source: /note="Description of Artificial Sequence: Synthetic polypeptide"

SEQ ID NO: 2670 - protein, 119 aa, Artificial Sequence; identical to SEQ ID NO: 2250
  source: /note="Description of Artificial Sequence: Synthetic polypeptide"

SEQ ID NO: 2671 - protein, 5 aa, Artificial Sequence
  source: /note="Description of Artificial Sequence: Synthetic peptide"
NFGMH

SEQ ID NO: 2672 - protein, 17 aa, Artificial Sequence
  source: /note="Description of Artificial Sequence: Synthetic peptide"
FISSGSSSIYYADTVKG

SEQ ID NO: 2673 - protein, 10 aa, Artificial Sequence
  source: /note="Description of Artificial Sequence: Synthetic peptide"
MRLDYYAMDY

SEQ ID NO: 2674 - protein, 107 aa, Artificial Sequence; identical to SEQ ID NO: 2254
  source: /note="Description of Artificial Sequence: Synthetic polypeptide"

SEQ ID NO: 2675 - protein, 11 aa, Artificial Sequence
  source: /note="Description of Artificial Sequence: Synthetic peptide"
RASKSISKYLA

SEQ ID NO: 2676 - protein, 7 aa, Artificial Sequence
  source: /note="Description of Artificial Sequence: Synthetic peptide"
SGSTLQS

SEQ ID NO: 2677 - protein, 9 aa, Artificial Sequence
  source: /note="Description of Artificial Sequence: Synthetic peptide"
QQHNEYPWT

SEQ ID NO: 2678 - protein, 119 aa, Artificial Sequence; identical to SEQ ID NO: 2258
  source: /note="Description of Artificial Sequence: Synthetic polypeptide"

SEQ ID NO: 2679 - protein, 5 aa, Artificial Sequence
  source: /note="Description of Artificial Sequence: Synthetic peptide"
EYTMH

SEQ ID NO: 2680 - protein, 17 aa, Artificial Sequence
  source: /note="Description of Artificial Sequence: Synthetic peptide"
GINPNNGGTSYNQKFKG

SEQ ID NO: 2681 - protein, 10 aa, Artificial Sequence
  source: /note="Description of Artificial Sequence: Synthetic peptide"
PGWYNYAMDY

SEQ ID NO: 2682 - protein, 107 aa, Artificial Sequence; identical to SEQ ID NO: 2262
  source: /note="Description of Artificial Sequence: Synthetic polypeptide"

SEQ ID NO: 2683 - protein, 11 aa, Artificial Sequence
  source: /note="Description of Artificial Sequence: Synthetic peptide"
KASQGVSTAVA

SEQ ID NO: 2684 - protein, 7 aa, Artificial Sequence
  source: /note="Description of Artificial Sequence: Synthetic peptide"
SASYRYT

SEQ ID NO: 2685 - protein, 9 aa, Artificial Sequence
  source: /note="Description of Artificial Sequence: Synthetic peptide"
QQHYITPWT

SEQ ID NO: 2686 - protein, 119 aa, Artificial Sequence; identical to SEQ ID NO: 2266
  source: /note="Description of Artificial Sequence: Synthetic polypeptide"

SEQ ID NO: 2687 - protein, 5 aa, Artificial Sequence
  source: /note="Description of Artificial Sequence: Synthetic peptide"
DYDMS

SEQ ID NO: 2688 - protein, 17 aa, Artificial Sequence
  source: /note="Description of Artificial Sequence: Synthetic peptide"
YISDGGYNTYYPDTVKG

SEQ ID NO: 2689 - protein, 10 aa, Artificial Sequence
  source: /note="Description of Artificial Sequence: Synthetic peptide"
QILLRYYFDY

SEQ ID NO: 2690 - protein, 113 aa, Artificial Sequence; identical to SEQ ID NO: 2270
  source: /note="Description of Artificial Sequence: Synthetic polypeptide"

SEQ ID NO: 2691 - protein, 17 aa, Artificial Sequence
  source: /note="Description of Artificial Sequence: Synthetic peptide"
KSSQSLLYSSNQKNYLA

SEQ ID NO: 2692 - protein, 7 aa, Artificial Sequence
  source: /note="Description of Artificial Sequence: Synthetic peptide"
WASTRES

SEQ ID NO: 2693 - protein, 9 aa, Artificial Sequence
  source: /note="Description of Artificial Sequence: Synthetic peptide"
QQYHSYPWT

SEQ ID NO: 2694 - protein, 119 aa, Artificial Sequence; identical to SEQ ID NO: 2274
  source: /note="Description of Artificial Sequence: Synthetic polypeptide"

SEQ ID NO: 2695 - protein, 107 aa, Artificial Sequence; identical to SEQ ID NO: 2275
  source: /note="Description of Artificial Sequence: Synthetic polypeptide"

SEQ ID NO: 2696 - protein, 138 aa, Artificial Sequence; identical to SEQ ID NO: 2276
  source: /note="Description of Artificial Sequence: Synthetic polypeptide"

SEQ ID NO: 2697 - protein, 127 aa, Artificial Sequence; identical to SEQ ID NO: 2277
  source: /note="Description of Artificial Sequence: Synthetic polypeptide"

SEQ ID NO: 2698 - protein, 119 aa, Artificial Sequence; identical to SEQ ID NO: 2278
  source: /note="Description of Artificial Sequence: Synthetic polypeptide"

SEQ ID NO: 2699 - protein, 10 aa, Artificial Sequence
  source: /note="Description of Artificial Sequence: Synthetic peptide"
GFTFSSFTMH

SEQ ID NO: 2700 - protein, 17 aa, Artificial Sequence
  source: /note="Description of Artificial Sequence: Synthetic peptide"
FIRSGSGIVFYADAVRG

SEQ ID NO: 2701 - protein, 10 aa, Artificial Sequence
  source: /note="Description of Artificial Sequence: Synthetic peptide"
RPLGHNTFDS

SEQ ID NO: 2702 - protein, 114 aa, Artificial Sequence; identical to SEQ ID NO: 2282
  source: /note="Description of Artificial Sequence: Synthetic polypeptide"

SEQ ID NO: 2703 - protein, 17 aa, Artificial Sequence
  source: /note="Description of Artificial Sequence: Synthetic peptide"
KSSQSLYYSGVKENLLA

SEQ ID NO: 2704 - protein, 6 aa, Artificial Sequence
  source: /note="Description of Artificial Sequence: Synthetic peptide"
ASIRFT

SEQ ID NO: 2705 - protein, 9 aa, Artificial Sequence
  source: /note="Description of Artificial Sequence: Synthetic peptide"
QQGINNPLT

SEQ ID NO: 2706 - protein, 119 aa, Artificial Sequence; identical to SEQ ID NO: 2286
  source: /note="Description of Artificial Sequence: Synthetic polypeptide"

SEQ ID NO: 2707 - protein, 10 aa, Artificial Sequence
  source: /note="Description of Artificial Sequence: Synthetic peptide"
GYSFTGHLMN

SEQ ID NO: 2708 - protein, 17 aa, Artificial Sequence
  source: /note="Description of Artificial Sequence: Synthetic peptide"
LIIPYNGGTSYNQKFKG

SEQ ID NO: 2709 - protein, 10 aa, Artificial Sequence
  source: /note="Description of Artificial Sequence: Synthetic peptide"
GLRGFYAMDY

SEQ ID NO: 2710 - protein, 112 aa, Artificial Sequence; identical to SEQ ID NO: 2290
  source: /note="Description of Artificial Sequence: Synthetic polypeptide"

SEQ ID NO: 2711 - protein, 16 aa, Artificial Sequence
  source: /note="Description of Artificial Sequence: Synthetic peptide"
RSSQSLVNSYGNTFLS

SEQ ID NO: 2712 - protein, 7 aa, Artificial Sequence
  source: /note="Description of Artificial Sequence: Synthetic peptide"
GISNRFS

SEQ ID NO: 2713 - protein, 9 aa, Artificial Sequence
  source: /note="Description of Artificial Sequence: Synthetic peptide"
LQGTHQPPT

SEQ ID NO: 2714 - protein, 11 aa, Artificial Sequence
  source: /note="Description of Artificial Sequence: Synthetic peptide"
GSITSSSYYWG

SEQ ID NO: 2715 - protein, 11 aa, Artificial Sequence
  source: /note="Description of Artificial Sequence: Synthetic peptide"
GSISSSKYYWG

SEQ ID NO: 2716 - protein, 11 aa, Artificial Sequence
  source: /note="Description of Artificial Sequence: Synthetic peptide"
GSISSTSHYWG

SEQ ID NO: 2717 - protein, 11 aa, Artificial Sequence
  source: /note="Description of Artificial Sequence: Synthetic peptide"
GSISSTSHYWG

SEQ ID NO: 2718 - protein, 11 aa, Artificial Sequence
  source: /note="Description of Artificial Sequence: Synthetic peptide"
GSISSTSHYWG

SEQ ID NO: 2719 - protein, 16 aa, Artificial Sequence
  source: /note="Description of Artificial Sequence: Synthetic peptide"
SIYYSGATFYNPSLKS

SEQ ID NO: 2720 - protein, 16 aa, Artificial Sequence
  source: /note="Description of Artificial Sequence: Synthetic peptide"
SIYYSGSTFYNPSLKS

SEQ ID NO: 2721 - protein, 16 aa, Artificial Sequence
  source: /note="Description of Artificial Sequence: Synthetic peptide"
SIYYSGSTFYNPSLKS

SEQ ID NO: 2722 - protein, 16 aa, Artificial Sequence
  source: /note="Description of Artificial Sequence: Synthetic peptide"
SIYYSGSTFYNPSLKS

SEQ ID NO: 2723 - protein, 16 aa, Artificial Sequence
  source: /note="Description of Artificial Sequence: Synthetic peptide"
SIYYSGSTFYNPSLKG

SEQ ID NO: 2724 - protein, 15 aa, Artificial Sequence
  source: /note="Description of Artificial Sequence: Synthetic peptide"
ARDANYYGSAWAFDP

SEQ ID NO: 2725 - protein, 15 aa, Artificial Sequence
  source: /note="Description of Artificial Sequence: Synthetic peptide"
ARDANYYGSAWAFDP

SEQ ID NO: 2726 - protein, 15 aa, Artificial Sequence
  source: /note="Description of Artificial Sequence: Synthetic peptide"
ARDANYYGSAWAFDP

SEQ ID NO: 2727 - protein, 15 aa, Artificial Sequence
  source: /note="Description of Artificial Sequence: Synthetic peptide"
ARDANYYGGAWAFDP

SEQ ID NO: 2728 - protein, 15 aa, Artificial Sequence
  source: /note="Description of Artificial Sequence: Synthetic peptide"
ARDANYYGSAWAFDP

SEQ ID NO: 2729 - protein, 123 aa, Artificial Sequence; identical to SEQ ID NO: 2309
  source: /note="Description of Artificial Sequence: Synthetic polypeptide"

SEQ ID NO: 2730 - protein, 123 aa, Artificial Sequence; identical to SEQ ID NO: 2310
  source: /note="Description of Artificial Sequence: Synthetic polypeptide"

SEQ ID NO: 2731 - protein, 123 aa, Artificial Sequence; identical to SEQ ID NO: 2311
  source: /note="Description of Artificial Sequence: Synthetic polypeptide"

SEQ ID NO: 2732 - protein, 123 aa, Artificial Sequence; identical to SEQ ID NO: 2312
  source: /note="Description of Artificial Sequence: Synthetic polypeptide"

SEQ ID NO: 2733 - protein, 123 aa, Artificial Sequence; identical to SEQ ID NO: 2313
  source: /note="Description of Artificial Sequence: Synthetic polypeptide"

SEQ ID NO: 2734 - protein, 11 aa, Artificial Sequence
  source: /note="Description of Artificial Sequence: Synthetic peptide"
RASQSVSSYLA

SEQ ID NO: 2735 - protein, 11 aa, Artificial Sequence
  source: /note="Description of Artificial Sequence: Synthetic peptide"
RASQSVSSYLA

SEQ ID NO: 2736 - protein, 11 aa, Artificial Sequence
  source: /note="Description of Artificial Sequence: Synthetic peptide"
RASQSVSSYLA

SEQ ID NO: 2737 - protein, 11 aa, Artificial Sequence
  source: /note="Description of Artificial Sequence: Synthetic peptide"
RASQSVSSYLA

SEQ ID NO: 2738 - protein, 11 aa, Artificial Sequence
  source: /note="Description of Artificial Sequence: Synthetic peptide"
RASQSVSSYLA

SEQ ID NO: 2739 - protein, 7 aa, Artificial Sequence
  source: /note="Description of Artificial Sequence: Synthetic peptide"
DASNRAT

SEQ ID NO: 2740 - protein, 7 aa, Artificial Sequence
  source: /note="Description of Artificial Sequence: Synthetic peptide"
DASNRAT

SEQ ID NO: 2741 - protein, 7 aa, Artificial Sequence
  source: /note="Description of Artificial Sequence: Synthetic peptide"
DASNRAT

SEQ ID NO: 2742 - protein, 7 aa, Artificial Sequence
  source: /note="Description of Artificial Sequence: Synthetic peptide"
DASNRAT

SEQ ID NO: 2743 - protein, 7 aa, Artificial Sequence
  source: /note="Description of Artificial Sequence: Synthetic peptide"
DASNRAT

SEQ ID NO: 2744 - protein, 8 aa, Artificial Sequence
  source: /note="Description of Artificial Sequence: Synthetic peptide"
QQHFNLPT

SEQ ID NO: 2745 - protein, 8 aa, Artificial Sequence
  source: /note="Description of Artificial Sequence: Synthetic peptide"
QQHFNLPT

SEQ ID NO: 2746 - protein, 8 aa, Artificial Sequence
  source: /note="Description of Artificial Sequence: Synthetic peptide"
QQHFNLPT

SEQ ID NO: 2747 - protein, 8 aa, Artificial Sequence
  source: /note="Description of Artificial Sequence: Synthetic peptide"
QQHFNLPT

SEQ ID NO: 2748 - protein, 8 aa, Artificial Sequence
  source: /note="Description of Artificial Sequence: Synthetic peptide"
QQHFNLPT

SEQ ID NO: 2749 - protein, 106 aa, Artificial Sequence; identical to SEQ ID NO: 2329
  source: /note="Description of Artificial Sequence: Synthetic polypeptide"

SEQ ID NO: 2750 - protein, 106 aa, Artificial Sequence; identical to SEQ ID NO: 2329
  source: /note="Description of Artificial Sequence: Synthetic polypeptide"

SEQ ID NO: 2751 - protein, 106 aa, Artificial Sequence; identical to SEQ ID NO: 2329
  source: /note="Description of Artificial Sequence: Synthetic polypeptide"

SEQ ID NO: 2752 - protein, 106 aa, Artificial Sequence; identical to SEQ ID NO: 2329
  source: /note="Description of Artificial Sequence: Synthetic polypeptide"

SEQ ID NO: 2753 - protein, 106 aa, Artificial Sequence; identical to SEQ ID NO: 2329
  source: /note="Description of Artificial Sequence: Synthetic polypeptide"

SEQ ID NO: 2754 - protein, 11 aa, Artificial Sequence
  source: /note="Description of Artificial Sequence: Synthetic peptide"
GSIESGSYYWG

SEQ ID NO: 2755 - protein, 11 aa, Artificial Sequence
  source: /note="Description of Artificial Sequence: Synthetic peptide"
GSIESGVYYWG

SEQ ID NO: 2756 - protein, 11 aa, Artificial Sequence
  source: /note="Description of Artificial Sequence: Synthetic peptide"
GSIASGSYYWG

SEQ ID NO: 2757 - protein, 11 aa, Artificial Sequence
  source: /note="Description of Artificial Sequence: Synthetic peptide"
GSIESGLYYWG

SEQ ID NO: 2758 - protein, 11 aa, Artificial Sequence
  source: /note="Description of Artificial Sequence: Synthetic peptide"
GSIESGLYYWG

SEQ ID NO: 2759 - protein, 16 aa, Artificial Sequence
  source: /note="Description of Artificial Sequence: Synthetic peptide"
SIYYSGGTYYNPSLKS

SEQ ID NO: 2760 - protein, 16 aa, Artificial Sequence
  source: /note="Description of Artificial Sequence: Synthetic peptide"
SIYYSGSTYYNPSLKS

SEQ ID NO: 2761 - protein, 16 aa, Artificial Sequence
  source: /note="Description of Artificial Sequence: Synthetic peptide"
SIYYSGQTYYNPSLKS

SEQ ID NO: 2762 - protein, 16 aa, Artificial Sequence
  source: /note="Description of Artificial Sequence: Synthetic peptide"
SIYYSGSTYYNPSLKS

SEQ ID NO: 2763 - protein, 16 aa, Artificial Sequence
  source: /note="Description of Artificial Sequence: Synthetic peptide"
SIYYSGSTYYNPSLKS

SEQ ID NO: 2764 - protein, 15 aa, Artificial Sequence
  source: /note="Description of Artificial Sequence: Synthetic peptide"
ARDGVLTLNKRSFDI

SEQ ID NO: 2765 - protein, 15 aa, Artificial Sequence
  source: /note="Description of Artificial Sequence: Synthetic peptide"
ARDGVLTLNKRSFDI

SEQ ID NO: 2766 - protein, 15 aa, Artificial Sequence
  source: /note="Description of Artificial Sequence: Synthetic peptide"
ARDGVLTLNKRSFDI

SEQ ID NO: 2767 - protein, 15 aa, Artificial Sequence
  source: /note="Description of Artificial Sequence: Synthetic peptide"
ARDGVLTLNKRSFDI

SEQ ID NO: 2768 - protein, 15 aa, Artificial Sequence
  source: /note="Description of Artificial Sequence: Synthetic peptide"
ARDGVLALNKRSFDI

SEQ ID NO: 2769 - protein, 123 aa, Artificial Sequence; identical to SEQ ID NO: 2349
  source: /note="Description of Artificial Sequence: Synthetic polypeptide"

SEQ ID NO: 2770 - protein, 123 aa, Artificial Sequence; identical to SEQ ID NO: 2350
  source: /note="Description of Artificial Sequence: Synthetic polypeptide"

SEQ ID NO: 2771 - protein, 123 aa, Artificial Sequence; identical to SEQ ID NO: 2351
  source: /note="Description of Artificial Sequence: Synthetic polypeptide"

SEQ ID NO: 2772 - protein, 123 aa, Artificial Sequence; identical to SEQ ID NO: 2352
  source: /note="Description of Artificial Sequence: Synthetic polypeptide"

SEQ ID NO: 2773 - protein, 123 aa, Artificial Sequence; identical to SEQ ID NO: 2353
  source: /note="Description of Artificial Sequence: Synthetic polypeptide"

SEQ ID NO: 2774 - protein, 12 aa, Artificial Sequence
  source: /note="Description of Artificial Sequence: Synthetic peptide"
RASQSVSSSYLA

SEQ ID NO: 2775 - protein, 12 aa, Artificial Sequence
  source: /note="Description of Artificial Sequence: Synthetic peptide"
RASQSVSSSYLA

SEQ ID NO: 2776 - protein, 12 aa, Artificial Sequence
  source: /note="Description of Artificial Sequence: Synthetic peptide"
RASQSVSSSYLA

SEQ ID NO: 2777 - protein, 12 aa, Artificial Sequence
  source: /note="Description of Artificial Sequence: Synthetic peptide"
RASQSVSSSYLA

SEQ ID NO: 2778 - protein, 12 aa, Artificial Sequence
  source: /note="Description of Artificial Sequence: Synthetic peptide"
RASQSVSSSYLA

SEQ ID NO: 2779 - protein, 7 aa, Artificial Sequence
  source: /note="Description of Artificial Sequence: Synthetic peptide"
GASSRAT

SEQ ID NO: 2780 - protein, 7 aa, Artificial Sequence
  source: /note="Description of Artificial Sequence: Synthetic peptide"
GASSRAT

SEQ ID NO: 2781 - protein, 7 aa, Artificial Sequence
  source: /note="Description of Artificial Sequence: Synthetic peptide"
GASSRAT

SEQ ID NO: 2782 - protein, 7 aa, Artificial Sequence
  source: /note="Description of Artificial Sequence: Synthetic peptide"
GASSRAT

SEQ ID NO: 2783 - protein, 7 aa, Artificial Sequence
  source: /note="Description of Artificial Sequence: Synthetic peptide"
GASSRAT

SEQ ID NO: 2784 - protein, 10 aa, Artificial Sequence
  source: /note="Description of Artificial Sequence: Synthetic peptide"
QQHTVRPPLT

SEQ ID NO: 2785 - protein, 10 aa, Artificial Sequence
  source: /note="Description of Artificial Sequence: Synthetic peptide"
QQHTVRPPLT

SEQ ID NO: 2786 - protein, 10 aa, Artificial Sequence
  source: /note="Description of Artificial Sequence: Synthetic peptide"
QQHTVRPPLT

SEQ ID NO: 2787 - protein, 10 aa, Artificial Sequence
  source: /note="Description of Artificial Sequence: Synthetic peptide"
QQHTVRPPLT

SEQ ID NO: 2788 - protein, 10 aa, Artificial Sequence
  source: /note="Description of Artificial Sequence: Synthetic peptide"
QQHTVRPPLT

SEQ ID NO: 2789 - protein, 109 aa, Artificial Sequence; identical to SEQ ID NO: 2369
  source: /note="Description of Artificial Sequence: Synthetic polypeptide"

SEQ ID NO: 2790 - protein, 109 aa, Artificial Sequence; identical to SEQ ID NO: 2369
  source: /note="Description of Artificial Sequence: Synthetic polypeptide"

SEQ ID NO: 2791 - protein, 109 aa, Artificial Sequence; identical to SEQ ID NO: 2369
  source: /note="Description of Artificial Sequence: Synthetic polypeptide"

SEQ ID NO: 2792 - protein, 109 aa, Artificial Sequence; identical to SEQ ID NO: 2369
  source: /note="Description of Artificial Sequence: Synthetic polypeptide"

SEQ ID NO: 2793 - protein, 109 aa, Artificial Sequence; identical to SEQ ID NO: 2369
  source: /note="Description of Artificial Sequence: Synthetic polypeptide"

SEQ ID NO: 2794 - protein, 11 aa, Artificial Sequence
  source: /note="Description of Artificial Sequence: Synthetic peptide"
GSIESGLYYWG

SEQ ID NO: 2795 - protein, 11 aa, Artificial Sequence
  source: /note="Description of Artificial Sequence: Synthetic peptide"
GSIESGLYYWG

SEQ ID NO: 2796 - protein, 9 aa, Artificial Sequence
  source: /note="Description of Artificial Sequence: Synthetic peptide"
YTFGNYYMH

SEQ ID NO: 2797 - protein, 9 aa, Artificial Sequence
  source: /note="Description of Artificial Sequence: Synthetic peptide"
YTFPAYYMH

SEQ ID NO: 2798 - protein, 9 aa, Artificial Sequence
  source: /note="Description of Artificial Sequence: Synthetic peptide"
YTFREYYMH

SEQ ID NO: 2799 - protein, 16 aa, Artificial Sequence
  source: /note="Description of Artificial Sequence: Synthetic peptide"
SIYYSGSTYYNPSLKS

SEQ ID NO: 2800 - protein, 16 aa, Artificial Sequence
  source: /note="Description of Artificial Sequence: Synthetic peptide"
SIYYSGSTYYNPSLKS

SEQ ID NO: 2801 - protein, 17 aa, Artificial Sequence
  source: /note="Description of Artificial Sequence: Synthetic peptide"
IINPSLGLTSYAQKFQG

SEQ ID NO: 2802 - protein, 17 aa, Artificial Sequence
  source: /note="Description of Artificial Sequence: Synthetic peptide"
IINPSLGLTSYAQKFQG

SEQ ID NO: 2803 - protein, 17 aa, Artificial Sequence
  source: /note="Description of Artificial Sequence: Synthetic peptide"
IINPSIGLTSYARKFQG

SEQ ID NO: 2804 - protein, 15 aa, Artificial Sequence
  source: /note="Description of Artificial Sequence: Synthetic peptide"
ARDGVLALNKRSFDI

SEQ ID NO: 2805 - protein, 15 aa, Artificial Sequence
  source: /note="Description of Artificial Sequence: Synthetic peptide"
ARDGVLALNKRSFDI

SEQ ID NO: 2806 - protein, 14 aa, Artificial Sequence
  source: /note="Description of Artificial Sequence: Synthetic peptide"
ARGGRTTWIGAFDI

SEQ ID NO: 2807 - protein, 14 aa, Artificial Sequence
  source: /note="Description of Artificial Sequence: Synthetic peptide"
ARGGRTTWIGAFDI

SEQ ID NO: 2808 - protein, 14 aa, Artificial Sequence
  source: /note="Description of Artificial Sequence: Synthetic peptide"
ARGGRTTWIGAFDI

SEQ ID NO: 2809 - protein, 123 aa, Artificial Sequence; identical to SEQ ID NO: 2389
  source: /note="Description of Artificial Sequence: Synthetic polypeptide"

SEQ ID NO: 2810 - protein, 123 aa, Artificial Sequence; identical to SEQ ID NO: 2390
  source: /note="Description of Artificial Sequence: Synthetic polypeptide"

SEQ ID NO: 2811 - protein, 121 aa, Artificial Sequence; identical to SEQ ID NO: 2391
  source: /note="Description of Artificial Sequence: Synthetic polypeptide"

SEQ ID NO: 2812 - protein, 121 aa, Artificial Sequence; identical to SEQ ID NO: 2392
  source: /note="Description of Artificial Sequence: Synthetic polypeptide"

SEQ ID NO: 2813 - protein, 121 aa, Artificial Sequence; identical to SEQ ID NO: 2393
  source: /note="Description of Artificial Sequence: Synthetic polypeptide"

SEQ ID NO: 2814 - protein, 12 aa, Artificial Sequence
  source: /note="Description of Artificial Sequence: Synthetic peptide"
RASQSVSSSYLA

SEQ ID NO: 2815 - protein, 12 aa, Artificial Sequence
  source: /note="Description of Artificial Sequence: Synthetic peptide"
RASQSVSSSYLA

SEQ ID NO: 2816 - protein, 11 aa, Artificial Sequence
  source: /note="Description of Artificial Sequence: Synthetic peptide"
RASQSVSSNLA

SEQ ID NO: 2817 - protein, 11 aa, Artificial Sequence
  source: /note="Description of Artificial Sequence: Synthetic peptide"
RASQSVSSNLA

SEQ ID NO: 2818 - protein, 11 aa, Artificial Sequence
  source: /note="Description of Artificial Sequence: Synthetic peptide"
RASQSVSSNLA

SEQ ID NO: 2819 - protein, 7 aa, Artificial Sequence
  source: /note="Description of Artificial Sequence: Synthetic peptide"
GASSRAT

SEQ ID NO: 2820 - protein, 7 aa, Artificial Sequence
  source: /note="Description of Artificial Sequence: Synthetic peptide"
GASSRAT

SEQ ID NO: 2821 - protein, 7 aa, Artificial Sequence
  source: /note="Description of Artificial Sequence: Synthetic peptide"
GASTRAT

SEQ ID NO: 2822 - protein, 7 aa, Artificial Sequence
  source: /note="Description of Artificial Sequence: Synthetic peptide"
GASTRAT

SEQ ID NO: 2823 - protein, 7 aa, Artificial Sequence
  source: /note="Description of Artificial Sequence: Synthetic peptide"
GASTRAT

SEQ ID NO: 2824 - protein, 10 aa, Artificial Sequence
  source: /note="Description of Artificial Sequence: Synthetic peptide"
QQHTVRPPLT

SEQ ID NO: 2825 - protein, 10 aa, Artificial Sequence
  source: /note="Description of Artificial Sequence: Synthetic peptide"
QQHTVRPPLT

SEQ ID NO: 2826 - protein, 10 aa, Artificial Sequence
  source: /note="Description of Artificial Sequence: Synthetic peptide"
QQYVVWPPLT

SEQ ID NO: 2827 - protein, 10 aa, Artificial Sequence
  source: /note="Description of Artificial Sequence: Synthetic peptide"
QQYVVWPPLT

SEQ ID NO: 2828 - protein, 10 aa, Artificial Sequence
  source: /note="Description of Artificial Sequence: Synthetic peptide"
QQYVVWPPLT

SEQ ID NO: 2829 - protein, 109 aa, Artificial Sequence; identical to SEQ ID NO: 2369
  source: /note="Description of Artificial Sequence: Synthetic polypeptide"

SEQ ID NO: 2830 - protein, 109 aa, Artificial Sequence; identical to SEQ ID NO: 2369
  source: /note="Description of Artificial Sequence: Synthetic polypeptide"

SEQ ID NO: 2831 - protein, 108 aa, Artificial Sequence; identical to SEQ ID NO: 2411
  source: /note="Description of Artificial Sequence: Synthetic polypeptide"

SEQ ID NO: 2832 - protein, 108 aa, Artificial Sequence; identical to SEQ ID NO: 2412
  source: /note="Description of Artificial Sequence: Synthetic polypeptide"

SEQ ID NO: 2833 - protein, 108 aa, Artificial Sequence; identical to SEQ ID NO: 2412
  source: /note="Description of Artificial Sequence: Synthetic polypeptide"

SEQ ID NO: 2834 - protein, 9 aa, Artificial Sequence
  source: /note="Description of Artificial Sequence: Synthetic peptide"
YTFREYYMH

SEQ ID NO: 2835 - protein, 9 aa, Artificial Sequence
  source: /note="Description of Artificial Sequence: Synthetic peptide"
YTFPAYYIH

SEQ ID NO: 2836 - protein, 9 aa, Artificial Sequence
  source: /note="Description of Artificial Sequence: Synthetic peptide"
YTFPAYYMH

SEQ ID NO: 2837 - protein, 9 aa, Artificial Sequence
  source: /note="Description of Artificial Sequence: Synthetic peptide"
YTFTSHYMG

SEQ ID NO: 2838 - protein, 9 aa, Artificial Sequence
  source: /note="Description of Artificial Sequence: Synthetic peptide"
YTFTSHYMG

SEQ ID NO: 2839 - protein, 9 aa, Artificial Sequence
  source: /note="Description of Artificial Sequence: Synthetic peptide"
YTFTSHYMG

SEQ ID NO: 2840 - protein, 17 aa, Artificial Sequence
  source: /note="Description of Artificial Sequence: Synthetic peptide"
IINPSIGLTSYARKFQG

SEQ ID NO: 2841 - protein, 17 aa, Artificial Sequence
  source: /note="Description of Artificial Sequence: Synthetic peptide"
IINPSLGLTSYARKFQG

SEQ ID NO: 2842 - protein, 17 aa, Artificial Sequence
  source: /note="Description of Artificial Sequence: Synthetic peptide"
IINPSLGLTSYARKFQG

SEQ ID NO: 2843 - protein, 17 aa, Artificial Sequence
  source: /note="Description of Artificial Sequence: Synthetic peptide"
VINPSMGATSYAQKFQG

SEQ ID NO: 2844 - protein, 17 aa, Artificial Sequence
  source: /note="Description of Artificial Sequence: Synthetic peptide"
IINPSMGATSYAQKFQG

SEQ ID NO: 2845 - protein, 17 aa, Artificial Sequence
  source: /note="Description of Artificial Sequence: Synthetic peptide"
IINPSMGATSYTQKFRG

SEQ ID NO: 2846 - protein, 14 aa, Artificial Sequence
  source: /note="Description of Artificial Sequence: Synthetic peptide"
ARGGRTTWIGALDI

SEQ ID NO: 2847 - protein, 14 aa, Artificial Sequence
  source: /note="Description of Artificial Sequence: Synthetic peptide"
ARGGRTTWIGALDI

SEQ ID NO: 2848 - protein, 14 aa, Artificial Sequence
  source: /note="Description of Artificial Sequence: Synthetic peptide"
ARGGRTTWIGAFDI

SEQ ID NO: 2849 - protein, 16 aa, Artificial Sequence
  source: /note="Description of Artificial Sequence: Synthetic peptide"
ARLHVSGSYYPAYLDY

SEQ ID NO: 2850 - protein, 16 aa, Artificial Sequence
  source: /note="Description of Artificial Sequence: Synthetic peptide"
ARLHVSGSYYPAYLDY

SEQ ID NO: 2851 - protein, 16 aa, Artificial Sequence
  source: /note="Description of Artificial Sequence: Synthetic peptide"
ARLHVSGSYYPAYLDY

SEQ ID NO: 2852 - protein, 121 aa, Artificial Sequence; identical to SEQ ID NO: 2432
  source: /note="Description of Artificial Sequence: Synthetic polypeptide"

SEQ ID NO: 2853 - protein, 121 aa, Artificial Sequence; identical to SEQ ID NO: 2433
  source: /note="Description of Artificial Sequence: Synthetic polypeptide"

SEQ ID NO: 2854 - protein, 121 aa, Artificial Sequence; identical to SEQ ID NO: 2434
  source: /note="Description of Artificial Sequence: Synthetic polypeptide"

SEQ ID NO: 2855 - protein, 124 aa, Artificial Sequence; identical to SEQ ID NO: 2435
  source: /note="Description of Artificial Sequence: Synthetic polypeptide"

SEQ ID NO: 2856 - protein, 123 aa, Artificial Sequence; identical to SEQ ID NO: 2436
  source: /note="Description of Artificial Sequence: Synthetic polypeptide"

SEQ ID NO: 2857 - protein, 123 aa, Artificial Sequence; identical to SEQ ID NO: 2437
  source: /note="Description of Artificial Sequence: Synthetic polypeptide"

SEQ ID NO: 2858 - protein, 11 aa, Artificial Sequence
  source: /note="Description of Artificial Sequence: Synthetic peptide"
RASQSVSSNLA

SEQ ID NO: 2859 - protein, 11 aa, Artificial Sequence
  source: /note="Description of Artificial Sequence: Synthetic peptide"
RASQSVSSNLA

SEQ ID NO: 2860 - protein, 11 aa, Artificial Sequence
  source: /note="Description of Artificial Sequence: Synthetic peptide"
RASQSVSSNLA

SEQ ID NO: 2861 - protein, 11 aa, Artificial Sequence
  source: /note="Description of Artificial Sequence: Synthetic peptide"
RASQSVSSNLA

SEQ ID NO: 2862 - protein, 11 aa, Artificial Sequence
  source: /note="Description of Artificial Sequence: Synthetic peptide"
RASQSVSSNLA

SEQ ID NO: 2863 - protein, 11 aa, Artificial Sequence
  source: /note="Description of Artificial Sequence: Synthetic peptide"
RASQSVSSNLA

SEQ ID NO: 2864 - protein, 7 aa, Artificial Sequence
  source: /note="Description of Artificial Sequence: Synthetic peptide"
GASTRAT

SEQ ID NO: 2865 - protein, 7 aa, Artificial Sequence
  source: /note="Description of Artificial Sequence: Synthetic peptide"
GASTRAT

SEQ ID NO: 2866 - protein, 7 aa, Artificial Sequence
  source: /note="Description of Artificial Sequence: Synthetic peptide"
GASTRAT

SEQ ID NO: 2867 - protein, 7 aa, Artificial Sequence
  source: /note="Description of Artificial Sequence: Synthetic peptide"
GASTRAT

SEQ ID NO: 2868 - protein, 7 aa, Artificial Sequence
  source: /note="Description of Artificial Sequence: Synthetic peptide"
GASTRAT

SEQ ID NO: 2869 - protein, 7 aa, Artificial Sequence
  source: /note="Description of Artificial Sequence: Synthetic peptide"
GASTRAT

SEQ ID NO: 2870 - protein, 10 aa, Artificial Sequence
  source: /note="Description of Artificial Sequence: Synthetic peptide"
QQYVVWPPLT

SEQ ID NO: 2871 - protein, 10 aa, Artificial Sequence
  source: /note="Description of Artificial Sequence: Synthetic peptide"
QQYVVWPPLT

SEQ ID NO: 2872 - protein, 10 aa, Artificial Sequence
  source: /note="Description of Artificial Sequence: Synthetic peptide"
QQYVVWPPLT

SEQ ID NO: 2873 - protein, 9 aa, Artificial Sequence
  source: /note="Description of Artificial Sequence: Synthetic peptide"
QQYIVFPWT

SEQ ID NO: 2874 - protein, 9 aa, Artificial Sequence
  source: /note="Description of Artificial Sequence: Synthetic peptide"
QQYIVFPWT

SEQ ID NO: 2875 - protein, 9 aa, Artificial Sequence
  source: /note="Description of Artificial Sequence: Synthetic peptide"
QQYIVFPWT

SEQ ID NO: 2876 - protein, 108 aa, Artificial Sequence; identical to SEQ ID NO: 2412
  source: /note="Description of Artificial Sequence: Synthetic polypeptide"

SEQ ID NO: 2877 - protein, 108 aa, Artificial Sequence; identical to SEQ ID NO: 2412
  source: /note="Description of Artificial Sequence: Synthetic polypeptide"

SEQ ID NO: 2878 - protein, 108 aa, Artificial Sequence; identical to SEQ ID NO: 2412
  source: /note="Description of Artificial Sequence: Synthetic polypeptide"

SEQ ID NO: 2879 - protein, 107 aa, Artificial Sequence; identical to SEQ ID NO: 2459
  source: /note="Description of Artificial Sequence: Synthetic polypeptide"

SEQ ID NO: 2880 - protein, 107 aa, Artificial Sequence; identical to SEQ ID NO: 2459
  source: /note="Description of Artificial Sequence: Synthetic polypeptide"

SEQ ID NO: 2881 - protein, 107 aa, Artificial Sequence; identical to SEQ ID NO: 2459
  source: /note="Description of Artificial Sequence: Synthetic polypeptide"

SEQ ID NO: 2882 - protein, 127 aa, Artificial Sequence; identical to SEQ ID NO: 2462
  source: /note="Description of Artificial Sequence: Synthetic polypeptide"

SEQ ID NO: 2883 - protein, 5 aa, Artificial Sequence
  source: /note="Description of Artificial Sequence: Synthetic peptide"
SDYWG

SEQ ID NO: 2884 - protein, 16 aa, Artificial Sequence
  source: /note="Description of Artificial Sequence: Synthetic peptide"
FITYSGSTSYNPSLKS

SEQ ID NO: 2885 - protein, 19 aa, Artificial Sequence
  source: /note="Description of Artificial Sequence: Synthetic peptide"
MPSFITLASLSTWEGYFDF

SEQ ID NO: 2886 - protein, 106 aa, Artificial Sequence; identical to SEQ ID NO: 2466
  source: /note="Description of Artificial Sequence: Synthetic polypeptide"

SEQ ID NO: 2887 - protein, 11 aa, Artificial Sequence
  source: /note="Description of Artificial Sequence: Synthetic peptide"
KASQSIHKNLA

SEQ ID NO: 2888 - protein, 7 aa, Artificial Sequence
  source: /note="Description of Artificial Sequence: Synthetic peptide"
YANSLQT

SEQ ID NO: 2889 - protein, 8 aa, Artificial Sequence
  source: /note="Description of Artificial Sequence: Synthetic peptide"
QQYYSGWT

SEQ ID NO: 2890 - protein, 127 aa, Artificial Sequence; identical to SEQ ID NO: 2470
  source: /note="Description of Artificial Sequence: Synthetic polypeptide"

SEQ ID NO: 2891 - protein, 4 aa, Artificial Sequence
  source: /note="Description of Artificial Sequence: Synthetic peptide"
DYWG

SEQ ID NO: 2892 - protein, 16 aa, Artificial Sequence
  source: /note="Description of Artificial Sequence: Synthetic peptide"
FITYSGSTSYNPSLKS

SEQ ID NO: 2893 - protein, 19 aa, Artificial Sequence
  source: /note="Description of Artificial Sequence: Synthetic peptide"
MPSFITLASLSTWEGYFDF

SEQ ID NO: 2894 - protein, 127 aa, Artificial Sequence; identical to SEQ ID NO: 2474
  source: /note="Description of Artificial Sequence: Synthetic polypeptide"

SEQ ID NO: 2895 - protein, 5 aa, Artificial Sequence
  source: /note="Description of Artificial Sequence: Synthetic peptide"
SDYWG

SEQ ID NO: 2896 - protein, 16 aa, Artificial Sequence
  source: /note="Description of Artificial Sequence: Synthetic peptide"
FITYSGSTSYNPSLKS

SEQ ID NO: 2897 - protein, 19 aa, Artificial Sequence
  source: /note="Description of Artificial Sequence: Synthetic peptide"
MPSFITLASLSTWEGYFDF

SEQ ID NO: 2898 - protein, 127 aa, Artificial Sequence; identical to SEQ ID NO: 2478
  source: /note="Description of Artificial Sequence: Synthetic polypeptide"

SEQ ID NO: 2899 - protein, 5 aa, Artificial Sequence
  source: /note="Description of Artificial Sequence: Synthetic peptide"
SDYWG

SEQ ID NO: 2900 - protein, 16 aa, Artificial Sequence
  source: /note="Description of Artificial Sequence: Synthetic peptide"
FITYSGSTSYNPSLKS

SEQ ID NO: 2901 - protein, 19 aa, Artificial Sequence
  source: /note="Description of Artificial Sequence: Synthetic peptide"
MPSFITLASLSTWEGYFDF

SEQ ID NO: 2902 - protein, 127 aa, Artificial Sequence; identical to SEQ ID NO: 2482
  source: /note="Description of Artificial Sequence: Synthetic polypeptide"

SEQ ID NO: 2903 - protein, 5 aa, Artificial Sequence
  source: /note="Description of Artificial Sequence: Synthetic peptide"
SDYWG

SEQ ID NO: 2904 - protein, 16 aa, Artificial Sequence
  source: /note="Description of Artificial Sequence: Synthetic peptide"
FITYSGSTSYNPSLKS

SEQ ID NO: 2905 - protein, 19 aa, Artificial Sequence
  source: /note="Description of Artificial Sequence: Synthetic peptide"
MPSFITLASLSTWEGYFDF

SEQ ID NO: 2906 - protein, 127 aa, Artificial Sequence; identical to SEQ ID NO: 2486
  source: /note="Description of Artificial Sequence: Synthetic polypeptide"

SEQ ID NO: 2907 - protein, 5 aa, Artificial Sequence
  source: /note="Description of Artificial Sequence: Synthetic peptide"
SDYWG

SEQ ID NO: 2908 - protein, 16 aa, Artificial Sequence
  source: /note="Description of Artificial Sequence: Synthetic peptide"
FITYSGSTSYNPSLKS

SEQ ID NO: 2909 - protein, 19 aa, Artificial Sequence
  source: /note="Description of Artificial Sequence: Synthetic peptide"
MPSFITLASLSTWEGYFDF

SEQ ID NO: 2910 - protein, 127 aa, Artificial Sequence; identical to SEQ ID NO: 2490
  source: /note="Description of Artificial Sequence: Synthetic polypeptide"

SEQ ID NO: 2911 - protein, 5 aa, Artificial Sequence
  source: /note="Description of Artificial Sequence: Synthetic peptide"
SDYWG

SEQ ID NO: 2912 - protein, 17 aa, Artificial Sequence
  source: /note="Description of Artificial Sequence: Synthetic peptide"
GFITYSGSTSYNPSLKS

SEQ ID NO: 2913 - protein, 19 aa, Artificial Sequence
  source: /note="Description of Artificial Sequence: Synthetic peptide"
MPSFITLASLSTWEGYFDF

SEQ ID NO: 2914 - protein, 127 aa, Artificial Sequence; identical to SEQ ID NO: 2494
  source: /note="Description of Artificial Sequence: Synthetic polypeptide"

SEQ ID NO: 2915 - protein, 5 aa, Artificial Sequence
  source: /note="Description of Artificial Sequence: Synthetic peptide"
SDYWG

SEQ ID NO: 2916 - protein, 16 aa, Artificial Sequence
  source: /note="Description of Artificial Sequence: Synthetic peptide"
FITYSGSTSYNPSLKS

SEQ ID NO: 2917 - protein, 19 aa, Artificial Sequence
  source: /note="Description of Artificial Sequence: Synthetic peptide"
MPSFITLASLSTWEGYFDF

SEQ ID NO: 2918 - protein, 127 aa, Artificial Sequence; identical to SEQ ID NO: 2498
  source: /note="Description of Artificial Sequence: Synthetic polypeptide"

SEQ ID NO: 2919 - protein, 5 aa, Artificial Sequence
  source: /note="Description of Artificial Sequence: Synthetic peptide"
SDYWG

SEQ ID NO: 2920 - protein, 16 aa, Artificial Sequence
  source: /note="Description of Artificial Sequence: Synthetic peptide"
FITYSGSTSYNPSLKS

SEQ ID NO: 2921 - protein, 19 aa, Artificial Sequence
  source: /note="Description of Artificial Sequence: Synthetic peptide"
MPSFITLASLSTWEGYFDF

SEQ ID NO: 2922 - protein, 127 aa, Artificial Sequence; identical to SEQ ID NO: 2502
  source: /note="Description of Artificial Sequence: Synthetic polypeptide"

SEQ ID NO: 2923 - protein, 5 aa, Artificial Sequence
  source: /note="Description of Artificial Sequence: Synthetic peptide"
SDYWG

SEQ ID NO: 2924 - protein, 16 aa, Artificial Sequence
  source: /note="Description of Artificial Sequence: Synthetic peptide"
FITYSGSTSYNPSLKS

SEQ ID NO: 2925 - protein, 19 aa, Artificial Sequence
  source: /note="Description of Artificial Sequence: Synthetic peptide"
MPSFITLASLSTWEGYFDF

SEQ ID NO: 2926 - protein, 127 aa, Artificial Sequence; identical to SEQ ID NO: 2506
  source: /note="Description of Artificial Sequence: Synthetic polypeptide"

SEQ ID NO: 2927 - protein, 5 aa, Artificial Sequence
  source: /note="Description of Artificial Sequence: Synthetic peptide"
SDYWG

SEQ ID NO: 2928 - protein, 16 aa, Artificial Sequence
  source: /note="Description of Artificial Sequence: Synthetic peptide"
FITYSGSTSYNPSLKS

SEQ ID NO: 2929 - protein, 19 aa, Artificial Sequence
  source: /note="Description of Artificial Sequence: Synthetic peptide"
MPSFITLASLSTWEGYFDF

SEQ ID NO: 2930 - protein, 127 aa, Artificial Sequence; identical to SEQ ID NO: 2510
  source: /note="Description of Artificial Sequence: Synthetic polypeptide"

SEQ ID NO: 2931 - protein, 5 aa, Artificial Sequence
  source: /note="Description of Artificial Sequence: Synthetic peptide"
SDYWG

SEQ ID NO: 2932 - protein, 16 aa, Artificial Sequence
  source: /note="Description of Artificial Sequence: Synthetic peptide"
FITYSGSTSYNPSLKS

SEQ ID NO: 2933 - protein, 19 aa, Artificial Sequence
  source: /note="Description of Artificial Sequence: Synthetic peptide"
MPSFITLASLSTWEGYFDF

SEQ ID NO: 2934 - protein, 127 aa, Artificial Sequence; identical to SEQ ID NO: 2514
  source: /note="Description of Artificial Sequence: Synthetic polypeptide"

SEQ ID NO: 2935 - protein, 5 aa, Artificial Sequence
  source: /note="Description of Artificial Sequence: Synthetic peptide"
SDYWG

SEQ ID NO: 2936 - protein, 16 aa, Artificial Sequence
  source: /note="Description of Artificial Sequence: Synthetic peptide"
FITYSGSTSYNPSLKS

SEQ ID NO: 2937 - protein, 19 aa, Artificial Sequence
  source: /note="Description of Artificial Sequence: Synthetic peptide"
MPSFITLASLSTWEGYFDF

SEQ ID NO: 2938 - protein, 127 aa, Artificial Sequence; identical to SEQ ID NO: 2518
  source: /note="Description of Artificial Sequence: Synthetic polypeptide"

SEQ ID NO: 2939 - protein, 5 aa, Artificial Sequence
  source: /note="Description of Artificial Sequence: Synthetic peptide"
SDYWG

SEQ ID NO: 2940 - protein, 16 aa, Artificial Sequence
  source: /note="Description of Artificial Sequence: Synthetic peptide"
FITYSGSTSYNPSLKS

SEQ ID NO: 2941 - protein, 19 aa, Artificial Sequence
  source: /note="Description of Artificial Sequence: Synthetic peptide"
MPSFITLASLSTWEGYFDF

SEQ ID NO: 2942 - protein, 127 aa, Artificial Sequence; identical to SEQ ID NO: 2522
  source: /note="Description of Artificial Sequence: Synthetic polypeptide"

SEQ ID NO: 2943 - protein, 5 aa, Artificial Sequence
  source: /note="Description of Artificial Sequence: Synthetic peptide"
SDYWG

SEQ ID NO: 2944 - protein, 16 aa, Artificial Sequence
  source: /note="Description of Artificial Sequence: Synthetic peptide"
FITYSGSTSYNPSLKS

SEQ ID NO: 2945 - protein, 19 aa, Artificial Sequence
  source: /note="Description of Artificial Sequence: Synthetic peptide"
MPSFITLASLSTWEGYFDF

SEQ ID NO: 2946 - protein, 129 aa, Artificial Sequence; identical to SEQ ID NO: 2526
  source: /note="Description of Artificial Sequence: Synthetic polypeptide"

SEQ ID NO: 2947 - protein, 5 aa, Artificial Sequence
  source: /note="Description of Artificial Sequence: Synthetic peptide"
SDYWG

SEQ ID NO: 2948 - protein, 16 aa, Artificial Sequence
  source: /note="Description of Artificial Sequence: Synthetic peptide"
FITYSGSTSYNPSLKS

SEQ ID NO: 2949 - protein, 19 aa, Artificial Sequence
  source: /note="Description of Artificial Sequence: Synthetic peptide"
MPSFITLASLSTWEGYFDF

SEQ ID NO: 2950 - protein, 127 aa, Artificial Sequence; identical to SEQ ID NO: 2530
  source: /note="Description of Artificial Sequence: Synthetic polypeptide"

SEQ ID NO: 2951 - protein, 5 aa, Artificial Sequence
  source: /note="Description of Artificial Sequence: Synthetic peptide"
SDYWG

SEQ ID NO: 2952 - protein, 16 aa, Artificial Sequence
  source: /note="Description of Artificial Sequence: Synthetic peptide"
FITYSGSTSYNPSLKS

SEQ ID NO: 2953 - protein, 19 aa, Artificial Sequence
  source: /note="Description of Artificial Sequence: Synthetic peptide"
MPSFITLASLSTWEGYFDF

SEQ ID NO: 2954 - protein, 127 aa, Artificial Sequence; identical to SEQ ID NO: 2534
  source: /note="Description of Artificial Sequence: Synthetic polypeptide"

SEQ ID NO: 2955 - protein, 5 aa, Artificial Sequence
  source: /note="Description of Artificial Sequence: Synthetic peptide"
SDYWG

SEQ ID NO: 2956 - protein, 16 aa, Artificial Sequence
  source: /note="Description of Artificial Sequence: Synthetic peptide"
FITYSGSTSYNPSLKS

SEQ ID NO: 2957 - protein, 19 aa, Artificial Sequence
  source: /note="Description of Artificial Sequence: Synthetic peptide"
MPSFITLASLSTWEGYFDF

SEQ ID NO: 2958 - protein, 127 aa, Artificial Sequence; identical to SEQ ID NO: 2538
  source: /note="Description of Artificial Sequence: Synthetic polypeptide"

SEQ ID NO: 2959 - protein, 5 aa, Artificial Sequence
  source: /note="Description of Artificial Sequence: Synthetic peptide"
SDYWG

SEQ ID NO: 2960 - protein, 16 aa, Artificial Sequence
  source: /note="Description of Artificial Sequence: Synthetic peptide"
FITYSGSTSYNPSLKS

SEQ ID NO: 2961 - protein, 19 aa, Artificial Sequence
  source: /note="Description of Artificial Sequence: Synthetic peptide"
MPSFITLASLSTWEGYFDF

SEQ ID NO: 2962 - protein, 127 aa, Artificial Sequence
  source: /note="Description of Artificial Sequence: Synthetic polypeptide"
EVQLQESGPGLVKPSETLSLTCTVSGSSIASDYWGWIRQPPGKGMEWIGFITYSGSTSYNPSLKSRVTISRDTSKNQFSLKLSSVTAADTAVYYCARMPSFITLASLSTWEGYFDFWGQGTMVTVSS

SEQ ID NO: 2963 - protein, 5 aa, Artificial Sequence
  source: /note="Description of Artificial Sequence: Synthetic peptide"
SDYWG

SEQ ID NO: 2964 - protein, 16 aa, Artificial Sequence
  source: /note="Description of Artificial Sequence: Synthetic peptide"
FITYSGSTSYNPSLKS

SEQ ID NO: 2965 - protein, 19 aa, Artificial Sequence
  source: /note="Description of Artificial Sequence: Synthetic peptide"
MPSFITLASLSTWEGYFDF

SEQ ID NO: 2966 - protein, 127 aa, Artificial Sequence
  source: /note="Description of Artificial Sequence: Synthetic polypeptide"
EVQLQESGPGLVKPSETLSLTCTVSGSSIASDYWGWIRKPPGKKMEWIGFITYSGSTSYNPSLKSRVTISRDTSKNQFSLKLSSVTAADTAVYYCARMPSFITLASLSTWEGYFDFWGQGTMVTVSS

SEQ ID NO: 2967 - protein, 5 aa, Artificial Sequence
  source: /note="Description of Artificial Sequence: Synthetic peptide"
SDYWG

SEQ ID NO: 2968 - protein, 16 aa, Artificial Sequence
  source: /note="Description of Artificial Sequence: Synthetic peptide"
FITYSGSTSYNPSLKS

SEQ ID NO: 2969 - protein, 19 aa, Artificial Sequence
  source: /note="Description of Artificial Sequence: Synthetic peptide"
MPSFITLASLSTWEGYFDF

SEQ ID NO: 2970 - protein, 127 aa, Artificial Sequence
  source: /note="Description of Artificial Sequence: Synthetic polypeptide"
EVQLQESGPGLVKPSETLSLTCTVSGSSIASDYWGWIRQFPGKGLEWIGFITYSGSTSYNPSLKSRVTISRDTSKNQFSLKLSSVTADDTAVYYCARMPSFITLASLSTWEGYFDFWGQGTMVTVSS

SEQ ID NO: 2971 - protein, 5 aa, Artificial Sequence
  source: /note="Description of Artificial Sequence: Synthetic peptide"
SDYWG

SEQ ID NO: 2972 - protein, 16 aa, Artificial Sequence
  source: /note="Description of Artificial Sequence: Synthetic peptide"
FITYSGSTSYNPSLKS

SEQ ID NO: 2973 - protein, 19 aa, Artificial Sequence
  source: /note="Description of Artificial Sequence: Synthetic peptide"
MPSFITLASLSTWEGYFDF

SEQ ID NO: 2974 - protein, 127 aa, Artificial Sequence
  source: /note="Description of Artificial Sequence: Synthetic polypeptide"
EVQLQESGPGLVKPSETLSLTCTVSGSSIASDYWGWIRKPPGKKMEWIGFITYSGSTSYNPSLKSRVTISVDTSKNQFSLKLSSVTAADTAVYYCARMPSFITLASLSTWEGYFDFWGQGTMVTVSS

SEQ ID NO: 2975 - protein, 5 aa, Artificial Sequence
  source: /note="Description of Artificial Sequence: Synthetic peptide"
SDYWG

SEQ ID NO: 2976 - protein, 16 aa, Artificial Sequence
  source: /note="Description of Artificial Sequence: Synthetic peptide"
FITYSGSTSYNPSLKS

SEQ ID NO: 2977 - protein, 19 aa, Artificial Sequence
  source: /note="Description of Artificial Sequence: Synthetic peptide"
MPSFITLASLSTWEGYFDF

SEQ ID NO: 2978 - protein, 127 aa, Artificial Sequence
  source: /note="Description of Artificial Sequence: Synthetic polypeptide"
EVQLQESGPGLVKPSETLSLTCSVTGSSIASDYWGWIRQPPGKGLEWIGFITYSGSTSYNPSLKSRVTISRDTSKNQFSLKLSSVTAADTAVYYCARMPSFITLASLSTWEGYFDFWGQGTMVTVSS

SEQ ID NO: 2979 - protein, 5 aa, Artificial Sequence
  source: /note="Description of Artificial Sequence: Synthetic peptide"
SDYWG

SEQ ID NO: 2980 - protein, 16 aa, Artificial Sequence
  source: /note="Description of Artificial Sequence: Synthetic peptide"
FITYSGSTSYNPSLKS

SEQ ID NO: 2981 - protein, 19 aa, Artificial Sequence
  source: /note="Description of Artificial Sequence: Synthetic peptide"
MPSFITLASLSTWEGYFDF

SEQ ID NO: 2982 - protein, 127 aa, Artificial Sequence
  source: /note="Description of Artificial Sequence: Synthetic polypeptide"
EVQLQQSGAGLLKPSETLSLTCSVTGSSIASDYWGWIRQPPGKGLEWIGFITYSGSTSYNPSLKSRVTISVDTSKNQFSLKLSSVTAADTAVYYCARMPSFITLASLSTWEGYFDFWGQGTMVTVSS

SEQ ID NO: 2983 - protein, 5 aa, Artificial Sequence
  source: /note="Description of Artificial Sequence: Synthetic peptide"
SDYWG

SEQ ID NO: 2984 - protein, 16 aa, Artificial Sequence
  source: /note="Description of Artificial Sequence: Synthetic peptide"
FITYSGSTSYNPSLKS

SEQ ID NO: 2985 - protein, 19 aa, Artificial Sequence
  source: /note="Description of Artificial Sequence: Synthetic peptide"
MPSFITLASLSTWEGYFDF

SEQ ID NO: 2986 - protein, 127 aa, Artificial Sequence
  source: /note="Description of Artificial Sequence: Synthetic polypeptide"
EVQLQESGPGLVKPPGTLSLTCSVTGSSIASDYWGWVRQPPGKGLEWIGFITYSGSTSYNPSLKSRVTISVDTSKNQFSLKLSSVTAADTAVYYCARMPSFITLASLSTWEGYFDFWGQGTMVTVSS

SEQ ID NO: 2987 - protein, 5 aa, Artificial Sequence
  source: /note="Description of Artificial Sequence: Synthetic peptide"
SDYWG

SEQ ID NO: 2988 - protein, 16 aa, Artificial Sequence
  source: /note="Description of Artificial Sequence: Synthetic peptide"
FITYSGSTSYNPSLKS

SEQ ID NO: 2989 - protein, 19 aa, Artificial Sequence
  source: /note="Description of Artificial Sequence: Synthetic peptide"
MPSFITLASLSTWEGYFDF

SEQ ID NO: 2990 - protein, 127 aa, Artificial Sequence
  source: /note="Description of Artificial Sequence: Synthetic polypeptide"
EVQLQESGPGLVKPSETLSLTCAVSGSSISSDYWGWIRQPPGKGLEWIGFITYSGSTSYNPSLKSRITISRDTSKNQFSLKLHSVTAADTAVYYCARMPSFITLASLSTWEGYFDFWGQGTMVTVSS

SEQ ID NO: 2991 - protein, 5 aa, Artificial Sequence
  source: /note="Description of Artificial Sequence: Synthetic peptide"
SDYWG

SEQ ID NO: 2992 - protein, 16 aa, Artificial Sequence
  source: /note="Description of Artificial Sequence: Synthetic peptide"
FITYSGSTSYNPSLKS

SEQ ID NO: 2993 - protein, 19 aa, Artificial Sequence
  source: /note="Description of Artificial Sequence: Synthetic peptide"
MPSFITLASLSTWEGYFDF

SEQ ID NO: 2994 - protein, 127 aa, Artificial Sequence
  source: /note="Description of Artificial Sequence: Synthetic polypeptide"
EVQLQESGPGLVKPSETLSLTCAVSGSSISSDYWGWIRQPPGKGLEWMGFITYSGSTSYNPSLKSRITISRDTSKNQFSLKLHSVTAADTAVYYCARMPSFITLASLSTWEGYFDFWGQGTMVTVSS

SEQ ID NO: 2995 - protein, 5 aa, Artificial Sequence
  source: /note="Description of Artificial Sequence: Synthetic peptide"
SDYWG

SEQ ID NO: 2996 - protein, 16 aa, Artificial Sequence
  source: /note="Description of Artificial Sequence: Synthetic peptide"
FITYSGSTSYNPSLKS

SEQ ID NO: 2997 - protein, 19 aa, Artificial Sequence
  source: /note="Description of Artificial Sequence: Synthetic peptide"
MPSFITLASLSTWEGYFDF

SEQ ID NO: 2998 - protein, 106 aa, Artificial Sequence
  source: /note="Description of Artificial Sequence: Synthetic polypeptide"
DIQMTQSPSSLSASVGDRVTITCKASQSIHKNLAWYQQKPGKAPKLLIYYANSLQTGVPSRFSGSGSGTDFTLTISSLQPEDFATYYCQQYYSGWTFGGGTKVEIK

SEQ ID NO: 2999 - protein, 12 aa, Artificial Sequence
  source: /note="Description of Artificial Sequence: Synthetic peptide"
KASQSIHKNLAW

SEQ ID NO: 3000 - protein, 7 aa, Artificial Sequence
  source: /note="Description of Artificial Sequence: Synthetic peptide"
YANSLQT

SEQ ID NO: 3001 - protein, 8 aa, Artificial Sequence
  source: /note="Description of Artificial Sequence: Synthetic peptide"
QQYYSGWT

SEQ ID NO: 3002 - protein, 106 aa, Artificial Sequence
  source: /note="Description of Artificial Sequence: Synthetic polypeptide"
DIQMTQSPSSLSASVGDRVTITCKASQSIHKNLAWYQQKPGKAPKFLIYYANSLQTGVPSRFSGSGSGTDFTLTISSLQPEDFATYYCQQYYSGWTFGGGTKVEIK

SEQ ID NO: 3003 - protein, 12 aa, Artificial Sequence
  source: /note="Description of Artificial Sequence: Synthetic peptide"
KASQSIHKNLAW

SEQ ID NO: 3004 - protein, 7 aa, Artificial Sequence
  source: /note="Description of Artificial Sequence: Synthetic peptide"
YANSLQT

SEQ ID NO: 3005 - protein, 8 aa, Artificial Sequence
  source: /note="Description of Artificial Sequence: Synthetic peptide"
QQYYSGWT

SEQ ID NO: 3006 - protein, 106 aa, Artificial Sequence
  source: /note="Description of Artificial Sequence: Synthetic polypeptide"
DIQMTQSPSSLSASVGDRVTITCKASQSIHKNLAWYQQKPGKAPKFLIYYANSLQTGIPSRFSGSGSGTDFTLTISSLQPEDFATYYCQQYYSGWTFGGGTKVEIK

SEQ ID NO: 3007 - protein, 12 aa, Artificial Sequence
  source: /note="Description of Artificial Sequence: Synthetic peptide"
KASQSIHKNLAW

SEQ ID NO: 3008 - protein, 7 aa, Artificial Sequence
  source: /note="Description of Artificial Sequence: Synthetic peptide"
YANSLQT

SEQ ID NO: 3009 - protein, 8 aa, Artificial Sequence
  source: /note="Description of Artificial Sequence: Synthetic peptide"
QQYYSGWT

SEQ ID NO: 3010 - protein, 106 aa, Artificial Sequence
  source: /note="Description of Artificial Sequence: Synthetic polypeptide"
DIQMTQSPSSLSASVGDRVTITCKASQSIHKNLAWYQQKPGKVPKLLIYYANSLQTGVPSRFSGSGSGTDFTLTISSLQPEDVATYYCQQYYSGWTFGGGTKVEIK

SEQ ID NO: 3011 - protein, 12 aa, Artificial Sequence
  source: /note="Description of Artificial Sequence: Synthetic peptide"
KASQSIHKNLAW

SEQ ID NO: 3012 - protein, 7 aa, Artificial Sequence
  source: /note="Description of Artificial Sequence: Synthetic peptide"
YANSLQT

SEQ ID NO: 3013 - protein, 8 aa, Artificial Sequence
  source: /note="Description of Artificial Sequence: Synthetic peptide"
QQYYSGWT

SEQ ID NO: 3014 - protein, 106 aa, Artificial Sequence
  source: /note="Description of Artificial Sequence: Synthetic polypeptide"
DIQMTQSPSSLSASVGDRVTITCKASQSIHKNLAWYQQKPGKVPKFLIYYANSLQTGVPSRFSGSGSGTDFTLTISSLQPEDVATYYCQQYYSGWTFGGGTKVEIK

SEQ ID NO: 3015 - protein, 12 aa, Artificial Sequence
  source: /note="Description of Artificial Sequence: Synthetic peptide"
KASQSIHKNLAW

SEQ ID NO: 3016 - protein, 7 aa, Artificial Sequence
  source: /note="Description of Artificial Sequence: Synthetic peptide"
YANSLQT

SEQ ID NO: 3017 - protein, 8 aa, Artificial Sequence
  source: /note="Description of Artificial Sequence: Synthetic peptide"
QQYYSGWT

SEQ ID NO: 3018 - protein, 106 aa, Artificial Sequence
  source: /note="Description of Artificial Sequence: Synthetic polypeptide"
DIQMTQSPSSLSASVGDRVTITCKASQSIHKNLAWYQQKPGKVPKFLIYYANSLQTGIPSRFSGSGSGTDFTLTISSLQPEDVATYYCQQYYSGWTFGGGTKVEIK

SEQ ID NO: 3019 - protein, 12 aa, Artificial Sequence
  source: /note="Description of Artificial Sequence: Synthetic peptide"
KASQSIHKNLAW

SEQ ID NO: 3020 - protein, 7 aa, Artificial Sequence
  source: /note="Description of Artificial Sequence: Synthetic peptide"
YANSLQT

SEQ ID NO: 3021 - protein, 8 aa, Artificial Sequence
  source: /note="Description of Artificial Sequence: Synthetic peptide"
QQYYSGWT

SEQ ID NO: 3022 - protein, 106 aa, Artificial Sequence; identical to SEQ ID NO: 2998
  source: /note="Description of Artificial Sequence: Synthetic polypeptide"

SEQ ID NO: 3023 - protein, 12 aa, Artificial Sequence
  source: /note="Description of Artificial Sequence: Synthetic peptide"
KASQSIHKNLAW

SEQ ID NO: 3024 - protein, 7 aa, Artificial Sequence
  source: /note="Description of Artificial Sequence: Synthetic peptide"
YANSLQT

SEQ ID NO: 3025 - protein, 8 aa, Artificial Sequence
  source: /note="Description of Artificial Sequence: Synthetic peptide"
QQYYSGWT

SEQ ID NO: 3026 - protein, 106 aa, Artificial Sequence; identical to SEQ ID NO: 3002
  source: /note="Description of Artificial Sequence: Synthetic polypeptide"

SEQ ID NO: 3027 - protein, 12 aa, Artificial Sequence
  source: /note="Description of Artificial Sequence: Synthetic peptide"
KASQSIHKNLAW

SEQ ID NO: 3028 - protein, 7 aa, Artificial Sequence
  source: /note="Description of Artificial Sequence: Synthetic peptide"
YANSLQT

SEQ ID NO: 3029 - protein, 8 aa, Artificial Sequence
  source: /note="Description of Artificial Sequence: Synthetic peptide"
QQYYSGWT

SEQ ID NO: 3030 - protein, 106 aa, Artificial Sequence
  source: /note="Description of Artificial Sequence: Synthetic polypeptide"
DIQMTQSPSSLSASVGDRVTITCKASQSIHKNLAWYQQKPGKAPKLLIYYANSLQTGVPSRFSGSGSGTDFTLTISSLQPEDFATYFCQQYYSGWTFGGGTKVEIK

SEQ ID NO: 3031 - protein, 12 aa, Artificial Sequence
  source: /note="Description of Artificial Sequence: Synthetic peptide"
KASQSIHKNLAW

SEQ ID NO: 3032 - protein, 7 aa, Artificial Sequence
  source: /note="Description of Artificial Sequence: Synthetic peptide"
YANSLQT

SEQ ID NO: 3033 - protein, 8 aa, Artificial Sequence
  source: /note="Description of Artificial Sequence: Synthetic peptide"
QQYYSGWT

SEQ ID NO: 3034 - protein, 106 aa, Artificial Sequence
  source: /note="Description of Artificial Sequence: Synthetic polypeptide"
DIQMTQSPSSLSASVGDRVTITCKASQSIHKNLAWYQQKPGKAPKFLIYYANSLQTGVPSRFSGSGSGTDFTLTISSLQPEDFATYFCQQYYSGWTFGGGTKVEIK

SEQ ID NO: 3035 - protein, 12 aa, Artificial Sequence
  source: /note="Description of Artificial Sequence: Synthetic peptide"
KASQSIHKNLAW

SEQ ID NO: 3036 - protein, 7 aa, Artificial Sequence
  source: /note="Description of Artificial Sequence: Synthetic peptide"
YANSLQT

SEQ ID NO: 3037 - protein, 8 aa, Artificial Sequence
  source: /note="Description of Artificial Sequence: Synthetic peptide"
QQYYSGWT

SEQ ID NO: 3038 - protein, 106 aa, Artificial Sequence
  source: /note="Description of Artificial Sequence: Synthetic polypeptide"
DIQMTQSPSSLSASVGDRVTITCKASQSIHKNLAWYQQKPGKAPKLLIYYANSLQTGIPSRFSGSGSGTDFTLTISSLQPEDFATYYCQQYYSGWTFGGGTKVEIK

SEQ ID NO: 3039 - protein, 12 aa, Artificial Sequence
  source: /note="Description of Artificial Sequence: Synthetic peptide"
KASQSIHKNLAW

SEQ ID NO: 3040 - protein, 7 aa, Artificial Sequence
  source: /note="Description of Artificial Sequence: Synthetic peptide"
YANSLQT

SEQ ID NO: 3041 - protein, 8 aa, Artificial Sequence
  source: /note="Description of Artificial Sequence: Synthetic peptide"
QQYYSGWT

SEQ ID NO: 3042 - protein, 121 aa, Artificial Sequence
  source: /note="Description of Artificial Sequence: Synthetic polypeptide"
DVQLQESGPGLVKPSQSLSLTCTVTGYSITSDYAWNWIRQFPGNKLEWMGYISNSGSASYNPSLKSRISITRDTSKNQFFLQLNSVTTEDTATYYCATLIYYDYGGAMNFWGQGTSVTVSS

SEQ ID NO: 3043 - protein, 11 aa, Artificial Sequence
  source: /note="Description of Artificial Sequence: Synthetic peptide"
GYSITSDYAWN

SEQ ID NO: 3044 - protein, 16 aa, Artificial Sequence
  source: /note="Description of Artificial Sequence: Synthetic peptide"
YISNSGSASYNPSLKS

SEQ ID NO: 3045 - protein, 12 aa, Artificial Sequence
  source: /note="Description of Artificial Sequence: Synthetic peptide"
LIYYDYGGAMNF

SEQ ID NO: 3046 - protein, 107 aa, Artificial Sequence
  source: /note="Description of Artificial Sequence: Synthetic polypeptide"
DIVMTQSHKFMSTSVGDRVSITCKASQGVSTTVAWYQQKPGQSPKLLIYSASYRYTGVPDRFTGSGSGTDFTFTISSVQSEDLAVYYCQHYYSTPWTFGGGTKLEIK

SEQ ID NO: 3047 - protein, 11 aa, Artificial Sequence
  source: /note="Description of Artificial Sequence: Synthetic peptide"
KASQGVSTTVA

SEQ ID NO: 3048 - protein, 7 aa, Artificial Sequence
  source: /note="Description of Artificial Sequence: Synthetic peptide"
SASYRYT

SEQ ID NO: 3049 - protein, 9 aa, Artificial Sequence
  source: /note="Description of Artificial Sequence: Synthetic peptide"
QHYYSTPWT

SEQ ID NO: 3050 - protein, 7 aa, Artificial Sequence
  source: /note="Description of Artificial Sequence: Synthetic peptide"
YASNLQT

SEQ ID NO: 3051 - protein, 7 aa, Artificial Sequence
  source: /note="Description of Artificial Sequence: Synthetic peptide"
YASSLQT

SEQ ID NO: 3052 - protein, 7 aa, Artificial Sequence
  source: /note="Description of Artificial Sequence: Synthetic peptide"
YASTLQT

SEQ ID NO: 3053 - protein, 7 aa, Artificial Sequence
  source: /note="Description of Artificial Sequence: Synthetic peptide"
YATTLQT

SEQ ID NO: 3054 - protein, 7 aa, Artificial Sequence
  source: /note="Description of Artificial Sequence: Synthetic peptide"
YASYLQT

SEQ ID NO: 3055 - protein, 7 aa, Artificial Sequence
  source: /note="Description of Artificial Sequence: Synthetic peptide"
YANQLQT

SEQ ID NO: 3056 - protein, 7 aa, Artificial Sequence
  source: /note="Description of Artificial Sequence: Synthetic peptide"
YAGSLQT

SEQ ID NO: 3057 - protein, 7 aa, Artificial Sequence
  source: /note="Description of Artificial Sequence: Synthetic peptide"
YASQLQT

SEQ ID NO: 3058 - protein, 7 aa, Artificial Sequence
  source: /note="Description of Artificial Sequence: Synthetic peptide"
YADSLQT

SEQ ID NO: 3059 - protein, 107 aa, Artificial Sequence; identical to SEQ ID NO: 3046
  source: /note="Description of Artificial Sequence: Synthetic polypeptide"

SEQ ID NO: 3060 - protein, 11 aa, Artificial Sequence
  source: /note="Description of Artificial Sequence: Synthetic peptide"
KASQGVSTTVA

SEQ ID NO: 3061 - protein, 7 aa, Artificial Sequence
  source: /note="Description of Artificial Sequence: Synthetic peptide"
SASYRYT

SEQ ID NO: 3062 - protein, 9 aa, Artificial Sequence
  source: /note="Description of Artificial Sequence: Synthetic peptide"
QHYYSTPWT

SEQ ID NO: 3063 - protein, 8 aa, Artificial Sequence
  source: /note="Description of Artificial Sequence: Synthetic peptide"
QQYYSGFT

SEQ ID NO: 3064 - protein, 8 aa, Artificial Sequence
  source: /note="Description of Artificial Sequence: Synthetic peptide"
QQYYSGYT

SEQ ID NO: 3065 - protein, 8 aa, Artificial Sequence
  source: /note="Description of Artificial Sequence: Synthetic peptide"
QQYYSGIT

SEQ ID NO: 3066 - protein, 8 aa, Artificial Sequence
  source: /note="Description of Artificial Sequence: Synthetic peptide"
QQYYSGVT

SEQ ID NO: 3067 - protein, 8 aa, Artificial Sequence
  source: /note="Description of Artificial Sequence: Synthetic peptide"
QQYYSGLT

SEQ ID NO: 3068 - protein, 121 aa, Artificial Sequence; identical to SEQ ID NO: 3042
  source: /note="Description of Artificial Sequence: Synthetic polypeptide"

SEQ ID NO: 3069 - protein, 11 aa, Artificial Sequence
  source: /note="Description of Artificial Sequence: Synthetic peptide"
GYSITSDYAWN

SEQ ID NO: 3070 - protein, 16 aa, Artificial Sequence
  source: /note="Description of Artificial Sequence: Synthetic peptide"
YISNSGSASYNPSLKS

SEQ ID NO: 3071 - protein, 12 aa, Artificial Sequence
  source: /note="Description of Artificial Sequence: Synthetic peptide"
LIYYDYGGAMNF

SEQ ID NO: 3072 - protein, 19 aa, Artificial Sequence
  source: /note="Description of Artificial Sequence: Synthetic peptide"
MPSFITLASLSTFEGYFDF

SEQ ID NO: 3073 - protein, 19 aa, Artificial Sequence
  source: /note="Description of Artificial Sequence: Synthetic peptide"
MPSFITLASLSTYEGYFDF

SEQ ID NO: 3074 - protein, 19 aa, Artificial Sequence
  source: /note="Description of Artificial Sequence: Synthetic peptide"
MPSFITLASLSTIEGYFDF

SEQ ID NO: 3075 - protein, 19 aa, Artificial Sequence
  source: /note="Description of Artificial Sequence: Synthetic peptide"
MPSFITLASLSTVEGYFDF

SEQ ID NO: 3076 - protein, 19 aa, Artificial Sequence
  source: /note="Description of Artificial Sequence: Synthetic peptide"
MPSFITLASLSTLEGYFDF

SEQ ID NO: 3077 - protein, 119 aa, Artificial Sequence; identical to SEQ ID NO: 1782
  source: /note="Description of Artificial Sequence: Synthetic polypeptide"

SEQ ID NO: 3078 - protein, 5 aa, Artificial Sequence
  source: /note="Description of Artificial Sequence: Synthetic peptide"
SYVMH

SEQ ID NO: 3079 - protein, 16 aa, Artificial Sequence
  source: /note="Description of Artificial Sequence: Synthetic peptide"
YIDPYNDGAKYNEKFK

SEQ ID NO: 3080 - protein, 9 aa, Artificial Sequence
  source: /note="Description of Artificial Sequence: Synthetic peptide"
GPYGWYFDV

SEQ ID NO: 3081 - protein, 16 aa, Artificial Sequence
  source: /note="Description of Artificial Sequence: Synthetic peptide"
YIDPYNRGAKYNEKFG

SEQ ID NO: 3082 - protein, 16 aa, Artificial Sequence
  source: /note="Description of Artificial Sequence: Synthetic peptide"
YIDPYNLGAKYNEKFG

SEQ ID NO: 3083 - protein, 16 aa, Artificial Sequence
  source: /note="Description of Artificial Sequence: Synthetic peptide"
YIDPYNKGAKYNEKFG

SEQ ID NO: 3084 - protein, 16 aa, Artificial Sequence
  source: /note="Description of Artificial Sequence: Synthetic peptide"
YIDPYNFGAKYNEKFG

SEQ ID NO: 3085 - protein, 16 aa, Artificial Sequence
  source: /note="Description of Artificial Sequence: Synthetic peptide"
YIDPYNSGAKYNEKFG

SEQ ID NO: 3086 - protein, 16 aa, Artificial Sequence
  source: /note="Description of Artificial Sequence: Synthetic peptide"
YIDPYNYGAKYNEKFG

SEQ ID NO: 3087 - protein, 16 aa, Artificial Sequence
  source: /note="Description of Artificial Sequence: Synthetic peptide"
YIDPYNVGAKYNEKFG

SEQ ID NO: 3088 - protein, 17 aa, Artificial Sequence
  source: /note="Description of Artificial Sequence: Synthetic peptide"
YIDPYNDRAKYNEKFKG

SEQ ID NO: 3089 - protein, 17 aa, Artificial Sequence
  source: /note="Description of Artificial Sequence: Synthetic peptide"
YIDPYNDNAKYNEKFKG

SEQ ID NO: 3090 - protein, 17 aa, Artificial Sequence
  source: /note="Description of Artificial Sequence: Synthetic peptide"
YIDPYNDQAKYNEKFKG

SEQ ID NO: 3091 - protein, 17 aa, Artificial Sequence
  source: /note="Description of Artificial Sequence: Synthetic peptide"
YIDPYNDEAKYNEKFKG

SEQ ID NO: 3092 - protein, 17 aa, Artificial Sequence
  source: /note="Description of Artificial Sequence: Synthetic peptide"
YIDPYNDLAKYNEKFKG

SEQ ID NO: 3093 - protein, 17 aa, Artificial Sequence
  source: /note="Description of Artificial Sequence: Synthetic peptide"
YIDPYNDKAKYNEKFKG

SEQ ID NO: 3094 - protein, 17 aa, Artificial Sequence
  source: /note="Description of Artificial Sequence: Synthetic peptide"
YIDPYNDSAKYNEKFKG

SEQ ID NO: 3095 - protein, 17 aa, Artificial Sequence
  source: /note="Description of Artificial Sequence: Synthetic peptide"
YIDPYNDYAKYNEKFKG

SEQ ID NO: 3096 - protein, 17 aa, Artificial Sequence
  source: /note="Description of Artificial Sequence: Synthetic peptide"
YIDPYNDVAKYNEKFKG

SEQ ID NO: 3097 - protein, 107 aa, Artificial Sequence; identical to SEQ ID NO: 1787
  source: /note="Description of Artificial Sequence: Synthetic polypeptide"

SEQ ID NO: 3098 - protein, 11 aa, Artificial Sequence
  source: /note="Description of Artificial Sequence: Synthetic peptide"
RASEHIYSYLS

SEQ ID NO: 3099 - protein, 7 aa, Artificial Sequence
  source: /note="Description of Artificial Sequence: Synthetic peptide"
NAKTLAE

SEQ ID NO: 3100 - protein, 9 aa, Artificial Sequence
  source: /note="Description of Artificial Sequence: Synthetic peptide"
QHHFGSPLT

SEQ ID NO: 3101 - protein, 7 aa, Artificial Sequence
  source: /note="Description of Artificial Sequence: Synthetic peptide"
AAKTLAE

SEQ ID NO: 3102 - protein, 7 aa, Artificial Sequence
  source: /note="Description of Artificial Sequence: Synthetic peptide"
YAKTLAE

SEQ ID NO: 3103 - protein, 7 aa, Artificial Sequence
  source: /note="Description of Artificial Sequence: Synthetic peptide"
WAKTLAE

SEQ ID NO: 3104 - protein, 7 aa, Artificial Sequence
  source: /note="Description of Artificial Sequence: Synthetic peptide"
SAKTLAE

SEQ ID NO: 3105 - protein, 7 aa, Artificial Sequence
  source: /note="Description of Artificial Sequence: Synthetic peptide"
TAKTLAE

SEQ ID NO: 3106 - protein, 7 aa, Artificial Sequence
  source: /note="Description of Artificial Sequence: Synthetic peptide"
IAKTLAE

SEQ ID NO: 3107 - protein, 7 aa, Artificial Sequence
  source: /note="Description of Artificial Sequence: Synthetic peptide"
VAKTLAE

SEQ ID NO: 3108 - protein, 7 aa, Artificial Sequence
  source: /note="Description of Artificial Sequence: Synthetic peptide"
NNKTLAE

SEQ ID NO: 3109 - protein, 7 aa, Artificial Sequence
  source: /note="Description of Artificial Sequence: Synthetic peptide"
NIKTLAE

SEQ ID NO: 3110 - protein, 7 aa, Artificial Sequence
  source: /note="Description of Artificial Sequence: Synthetic peptide"
NLLTLAE

SEQ ID NO: 3111 - protein, 7 aa, Artificial Sequence
  source: /note="Description of Artificial Sequence: Synthetic peptide"
NTKTLAE

SEQ ID NO: 3112 - protein, 7 aa, Artificial Sequence
  source: /note="Description of Artificial Sequence: Synthetic peptide"
NVKTLAE

SEQ ID NO: 3113 - protein, 119 aa, Artificial Sequence
  source: /note="Description of Artificial Sequence: Synthetic polypeptide"
EVQLVQSGAEVKKPGASVKVSCKASGYTFSSYVMHWVRQAPGQRLEWIGYIDPYNDGAKYSQKFQGRVTLTRDTSASTAYMELSSLRSEDTAVYYCARGGPYGWYFDVWGQGTTVTVSS

SEQ ID NO: 3114 - protein, 6 aa, Artificial Sequence
  source: /note="Description of Artificial Sequence: Synthetic peptide"
SYVMHW

SEQ ID NO: 3115 - protein, 16 aa, Artificial Sequence
  source: /note="Description of Artificial Sequence: Synthetic peptide"
YIDPYNDGAKYSQKFQ

SEQ ID NO: 3116 - protein, 10 aa, Artificial Sequence
  source: /note="Description of Artificial Sequence: Synthetic peptide"
GGPYGWYFDV

SEQ ID NO: 3117 - protein, 119 aa, Artificial Sequence
  source: /note="Description of Artificial Sequence: Synthetic polypeptide"
EVQLVQSGAEVKKPGASVKVSCKASGYTFSSYVMHWVRQAPGQRLEWIGYIDPYNDGAKYSQKFQGRVTLTSDKSASTAYMELSSLRSEDTAVYYCARGGPYGWYFDVWGQGTTVTVSS

SEQ ID NO: 3118 - protein, 5 aa, Artificial Sequence
  source: /note="Description of Artificial Sequence: Synthetic peptide"
SYVMH

SEQ ID NO: 3119 - protein, 16 aa, Artificial Sequence
  source: /note="Description of Artificial Sequence: Synthetic peptide"
YIDPYNDGAKYSQKFQ

SEQ ID NO: 3120 - protein, 10 aa, Artificial Sequence
  source: /note="Description of Artificial Sequence: Synthetic peptide"
GGPYGWYFDV

SEQ ID NO: 3121 - protein, 119 aa, Artificial Sequence
  source: /note="Description of Artificial Sequence: Synthetic polypeptide"
EVQLVQSGAEVKKPGASVKVSCKASGYTFSSYVMHWVRQAPGQGLEWIGYIDPYNDGAKYAQKFQGRVTLTRDTSTSTVYMELSSLRSEDTAVYYCARGGPYGWYFDVWGQGTTVTVSS

SEQ ID NO: 3122 - protein, 5 aa, Artificial Sequence
  source: /note="Description of Artificial Sequence: Synthetic peptide"
SYVMH

SEQ ID NO: 3123 - protein, 13 aa, Artificial Sequence
  source: /note="Description of Artificial Sequence: Synthetic peptide"
YIDPYNDGAKYAQ

SEQ ID NO: 3124 - protein, 10 aa, Artificial Sequence
  source: /note="Description of Artificial Sequence: Synthetic peptide"
GGPYGWYFDV

SEQ ID NO: 3125 - protein, 119 aa, Artificial Sequence
  source: /note="Description of Artificial Sequence: Synthetic polypeptide"
EVQLVQSGAEVKKPGASVKVSCKASGYTFSSYVMHWVRQAPGQGLEWIGYIDPYNDGAKYAQKFQGRVTLTSDKSTSTVYMELSSLRSEDTAVYYCARGGPYGWYFDVWGQGTTVTVSS

SEQ ID NO: 3126 - protein, 5 aa, Artificial Sequence
  source: /note="Description of Artificial Sequence: Synthetic peptide"
SYVMH

SEQ ID NO: 3127 - protein, 16 aa, Artificial Sequence
  source: /note="Description of Artificial Sequence: Synthetic peptide"
YIDPYNDGAKYAQKFQ

SEQ ID NO: 3128 - protein, 10 aa, Artificial Sequence
  source: /note="Description of Artificial Sequence: Synthetic peptide"
GGPYGWYFDV

SEQ ID NO: 3129 - protein, 119 aa, Artificial Sequence
  source: /note="Description of Artificial Sequence: Synthetic polypeptide"
EVQLVQSGAEVKKPGSSVKVSCKASGYTFSSYVMHWVRQAPGQGLEWIGYIDPYNDGAKYAQKFQGRVTLTSDKSTSTAYMELSSLRSEDTAVYYCARGGPYGWYFDVWGQGTTVTVSS

SEQ ID NO: 3130 - protein, 5 aa, Artificial Sequence
  source: /note="Description of Artificial Sequence: Synthetic peptide"
SYVMH

SEQ ID NO: 3131 - protein, 16 aa, Artificial Sequence
  source: /note="Description of Artificial Sequence: Synthetic peptide"
YIDPYNDGAKYAQKFQ

SEQ ID NO: 3132 - protein, 10 aa, Artificial Sequence
  source: /note="Description of Artificial Sequence: Synthetic peptide"
GGPYGWYFDV

SEQ ID NO: 3133 - protein, 119 aa, Artificial Sequence
  source: /note="Description of Artificial Sequence: Synthetic polypeptide"
EVQLVQSGAEVKKPGASVKVSCKASGYTFSSYVMHWVRQAPGQGLEWIGYIDPYNDGAKYAQKFQGRVTLTSDKSISTAYMELSRLRSDDTVVYYCARGGPYGWYFDVWGQGTTVTVSS

SEQ ID NO: 3134 - protein, 5 aa, Artificial Sequence
  source: /note="Description of Artificial Sequence: Synthetic peptide"
SYVMH

SEQ ID NO: 3135 - protein, 16 aa, Artificial Sequence
  source: /note="Description of Artificial Sequence: Synthetic peptide"
YIDPYNDGAKYAQKFQ

SEQ ID NO: 3136 - protein, 10 aa, Artificial Sequence
  source: /note="Description of Artificial Sequence: Synthetic peptide"
GGPYGWYFDV

SEQ ID NO: 3137 - protein, 107 aa, Artificial Sequence
  source: /note="Description of Artificial Sequence: Synthetic polypeptide"
DIQMTQSPSSLSASVGDRVTITCRASEHIYSYLSWYQQKPGKAPKLLIYNAKTLAEGVPSRFSGSGSGTDFTLTISSLQPEDFATYYCQHHFGSPLTFGQGTRLEIK

SEQ ID NO: 3138 - protein, 11 aa, Artificial Sequence
  source: /note="Description of Artificial Sequence: Synthetic peptide"
RASEHIYSYLS

SEQ ID NO: 3139 - protein, 7 aa, Artificial Sequence
  source: /note="Description of Artificial Sequence: Synthetic peptide"
NAKTLAE

SEQ ID NO: 3140 - protein, 9 aa, Artificial Sequence
  source: /note="Description of Artificial Sequence: Synthetic peptide"
QHHFGSPLT

SEQ ID NO: 3141 - protein, 107 aa, Artificial Sequence
  source: /note="Description of Artificial Sequence: Synthetic polypeptide"
DIQMTQSPSSLSASVGDRVTITCRASEHIYSYLSWYQQKPGKAPKLLIYNAKTLAEGVPSRFSGSGSGTQFTLTISSLQPEDFATYYCQHHFGSPLTFGQGTRLEIK

SEQ ID NO: 3142 - protein, 11 aa, Artificial Sequence
  source: /note="Description of Artificial Sequence: Synthetic peptide"
RASEHIYSYLS

SEQ ID NO: 3143 - protein, 7 aa, Artificial Sequence
  source: /note="Description of Artificial Sequence: Synthetic peptide"
NAKTLAE

SEQ ID NO: 3144 - protein, 9 aa, Artificial Sequence
  source: /note="Description of Artificial Sequence: Synthetic peptide"
QHHFGSPLT

SEQ ID NO: 3145 - protein, 107 aa, Artificial Sequence
  source: /note="Description of Artificial Sequence: Synthetic polypeptide"
DIQMTQSPSSLSASVGDRVTITCRASEHIYSYLSWYQQKPGKVPKLLIYNAKTLAEGVPSRFSGSGSGTDFTLTISSLQPEDVATYYCQHHFGSPLTFGQGTRLEIK

SEQ ID NO: 3146 - protein, 11 aa, Artificial Sequence
  source: /note="Description of Artificial Sequence: Synthetic peptide"
RASEHIYSYLS

SEQ ID NO: 3147 - protein, 7 aa, Artificial Sequence
  source: /note="Description of Artificial Sequence: Synthetic peptide"
NAKTLAE

SEQ ID NO: 3148 - protein, 9 aa, Artificial Sequence
  source: /note="Description of Artificial Sequence: Synthetic peptide"
QHHFGSPLT

SEQ ID NO: 3149 - protein, 107 aa, Artificial Sequence
  source: /note="Description of Artificial Sequence: Synthetic polypeptide"
DIQMTQSPSSLSASVGDRVTITCRASEHIYSYLSWYQQKPGKVPKLLIYNAKTLAEGVPSRFSGSGSGTQFTLTISSLQPEDVATYYCQHHFGSPLTFGQGTRLEIK

SEQ ID NO: 3150 - protein, 11 aa, Artificial Sequence
  source: /note="Description of Artificial Sequence: Synthetic peptide"
RASEHIYSYLS

SEQ ID NO: 3151 - protein, 7 aa, Artificial Sequence
  source: /note="Description of Artificial Sequence: Synthetic peptide"
NAKTLAE

SEQ ID NO: 3152 - protein, 9 aa, Artificial Sequence
  source: /note="Description of Artificial Sequence: Synthetic peptide"
QHHFGSPLT

SEQ ID NO: 3153 - protein, 119 aa, Artificial Sequence; identical to SEQ ID NO: 3133
  source: /note="Description of Artificial Sequence: Synthetic polypeptide"

SEQ ID NO: 3154 - protein, 17 aa, Artificial Sequence
  source: /note="Description of Artificial Sequence: Synthetic peptide"
YIDPYNDGAKYAQKFQG

SEQ ID NO: 3155 - protein, 17 aa, Artificial Sequence
  source: /note="Description of Artificial Sequence: Synthetic peptide"
YIDPYNDGAKYSQKFQG

SEQ ID NO: 3156 - protein, 119 aa, Artificial Sequence; identical to SEQ ID NO: 3133
  source: /note="Description of Artificial Sequence: Synthetic polypeptide"

SEQ ID NO: 3157 - protein, 10 aa, Artificial Sequence
  source: /note="Description of Artificial Sequence: Synthetic peptide"
GGPYGAYFDV

SEQ ID NO: 3158 - protein, 10 aa, Artificial Sequence
  source: /note="Description of Artificial Sequence: Synthetic peptide"
GGPYGDYFDV

SEQ ID NO: 3159 - protein, 10 aa, Artificial Sequence
  source: /note="Description of Artificial Sequence: Synthetic peptide"
GGPYGEYFDV

SEQ ID NO: 3160 - protein, 10 aa, Artificial Sequence
  source: /note="Description of Artificial Sequence: Synthetic peptide"
GGPYGFYFDV

SEQ ID NO: 3161 - protein, 10 aa, Artificial Sequence
  source: /note="Description of Artificial Sequence: Synthetic peptide"
GGPYGGYFDV

SEQ ID NO: 3162 - protein, 10 aa, Artificial Sequence
  source: /note="Description of Artificial Sequence: Synthetic peptide"
GGPYGIYFDV

SEQ ID NO: 3163 - protein, 10 aa, Artificial Sequence
  source: /note="Description of Artificial Sequence: Synthetic peptide"
GGPYGKYFDV

SEQ ID NO: 3164 - protein, 10 aa, Artificial Sequence
  source: /note="Description of Artificial Sequence: Synthetic peptide"
GGPYGNYFDV

SEQ ID NO: 3165 - protein, 10 aa, Artificial Sequence
  source: /note="Description of Artificial Sequence: Synthetic peptide"
GGPYGQYFDV

SEQ ID NO: 3166 - protein, 10 aa, Artificial Sequence
  source: /note="Description of Artificial Sequence: Synthetic peptide"
GGPYGRYFDV

SEQ ID NO: 3167 - protein, 10 aa, Artificial Sequence
  source: /note="Description of Artificial Sequence: Synthetic peptide"
GGPYGSYFDV

SEQ ID NO: 3168 - protein, 10 aa, Artificial Sequence
  source: /note="Description of Artificial Sequence: Synthetic peptide"
GGPYGTYFDV

SEQ ID NO: 3169 - protein, 10 aa, Artificial Sequence
  source: /note="Description of Artificial Sequence: Synthetic peptide"
GGPYGVYFDV

SEQ ID NO: 3170 - protein, 10 aa, Artificial Sequence
  source: /note="Description of Artificial Sequence: Synthetic peptide"
GGPYGYYFDV

SEQ ID NO: 3171 - protein, 116 aa, Artificial Sequence
  source: /note="Description of Artificial Sequence: Synthetic polypeptide"
QVQLMESGPGLVQPSQTLSLTCTVSGFPLTSYTVHWVRQPPGKGLEWIGAIWSSGSTDYNSALKSRLNINRDSSKSQVFLKMNSLQTEDTAIYFCTKSGWAFFDYWGQGVMVTVSS

SEQ ID NO: 3172 - protein, 106 aa, Artificial Sequence
  source: /note="Description of Artificial Sequence: Synthetic polypeptide"
DIQMTQSPSLLSASVGDRVTLNCIASQNIYKSLAWYQLKLGEAPKLLIYNANSLQAGIPSRFSGSGSGTDFALTISGLQPEDVATYFCQQYSGGYTFGAGTKLELK

SEQ ID NO: 3173 - protein, 119 aa, Artificial Sequence
  source: /note="Description of Artificial Sequence: Synthetic polypeptide"
EVQLVESGGDLVQPGRSLKISCVASGFTFSDYYMAWVRLAPQKGLEWVASISYEGSRTHYGDSVRGRFIISRDNPKNILYLQMNSLGSEDTATYFCARHTGTLDWLVYWGQGTLVIVSS

SEQ ID NO: 3174 - protein, 106 aa, Artificial Sequence
  source: /note="Description of Artificial Sequence: Synthetic polypeptide"
NIVMAQSPKSMSISAGDRVTMNCKASQNVDNNIAWYQQKPGQSPKLLIFYASNRYSGVPDRFTGGGYGTDFTLTIKSVQAEDAAFYYCQRIYNFPTFGSGTKLEIK

SEQ ID NO: 3175 - protein, 447 aa, Artificial Sequence
  source: /note="Description of Artificial Sequence: Synthetic polypeptide"
QVQLVQSGAEVKKPGASVKVSCKASGYTFTDYNINWVRQAPGQGLEWMGYIYPYIGGSGYAQKFQGRVTMTRDTSTSTVYMELSSLRSEDTAVYYCAREDKTARNAMDYWGQGTLVTVSSASTKGPSVFPLAPCSRSTSESTAALGCLVKDYFPEPVTVSWNSGALTSGVHTFPAVLQSSGLYSLSSVVTVPSSSLGTKTYTCNVDHKPSNTKVDKRVESKYGPPCPPCPAPEFLGGPSVFLFPPKPKDTLMISRTPEVTCVVVDVSQEDPEVQFNWYVDGVEVHNAKTKPREEQFNSTYRVVSVLTVLHQDWLNGKEYKCKVSNKGLPSSIEKTISKAKGQPREPQVYTLPPCQDELTKNQVSLWCLVKGFYPSDIAVEWESNGQPENNYKTTPPVLDSDGSFFLYSRLTVDKSRWQEGNVFSCSVMHEALHNHYTQKSLSLSPGK

SEQ ID NO: 3176 - protein, 214 aa, Artificial Sequence; identical to SEQ ID NO: 1548
  source: /note="Description of Artificial Sequence: Synthetic polypeptide"

SEQ ID NO: 3177 - protein, 458 aa, Artificial Sequence
  source: /note="Description of Artificial Sequence: Synthetic polypeptide"
EVQLVETGGGLIQPGRSLRLSCAASGFTFSSYAMHWVRQAPGKGLEWVAVISYAGEVKYYADSVKGRFTISRDNSKNTLYLQMNSLRAEDTAVYYCARDPLPLHYYGMDVWGQGTTVTVSSASGQPKAAPSVTLFPPSSEELQANKATLVCLISDFYPGAVTVAWKADSSPVKAGVETTTPSKQSNNKYAASSYLSLTPEQWKSHRSYSCQVTHEGSTVEKTVAPTECSESKYGPPCPPCPAPEFLGGPSVFLFPPKPKDTLMISRTPEVTCVVVDVSQEDPEVQFNWYVDGVEVHNAKTKPREEQFNSTYRVVSVLTVLHQDWLNGKEYKCKVSNKGLPSSIEKTISKAKGQPREPQVCTLPPSQDELTKNQVSLSCAVKGFYPSDIAVEWESNGQPENNYKTTPPVLDSDGSFFLVSRLTVDKSRWQEGNVFSCSVMHEALHNHYTQKSLSLSPGK

SEQ ID NO: 3178 - protein, 215 aa, Artificial Sequence
  source: /note="Description of Artificial Sequence: Synthetic polypeptide"
QSALTQPRSASGNPGQRVTISCSGSSSNMGRRPVNWYQQIPGTAPKLLIYSQNQRPSGVPDRFSGSQSGTSASLTISGLQSEDEAEYFCAVWDDIGRVLQLGGGTQLAVLSSASTKGPSVFPLAPSSKSTSGGTAALGCLVKDYFPEPVTVSWNSGALTSGVHTFPAVLQSSGLYSLSSVVTVPSSSLGTQTYICNVNHKPSNTKVDKKVEPKSC

SEQ ID NO: 3179 - protein, 120 aa, Artificial Sequence; identical to SEQ ID NO: 1052
  source: /note="Description of Artificial Sequence: Synthetic polypeptide"

SEQ ID NO: 3180 - protein, 107 aa, Artificial Sequence; identical to SEQ ID NO: 1056
  source: /note="Description of Artificial Sequence: Synthetic polypeptide"

SEQ ID NO: 3181 - protein, 120 aa, Artificial Sequence
  source: /note="Description of Artificial Sequence: Synthetic polypeptide"
EVQLQQSGAELVRSGASVKMSCKVNDYTFTNYNMHWLRQTPGQGLEWIGYIYPGNGDTNYNQKFKGKATLTADTSSSTAYMQIISLTSEDPAVYFCARQGIHYYYIDVWGAGTTVTVSSG

SEQ ID NO: 3182 - protein, 10 aa, Artificial Sequence
  source: /note="Description of Artificial Sequence: Synthetic peptide"
DYTFTNYNMH

SEQ ID NO: 3183 - protein, 13 aa, Artificial Sequence
  source: /note="Description of Artificial Sequence: Synthetic peptide"
YIYPGNGDTNYNQ

SEQ ID NO: 3184 - protein, 10 aa, Artificial Sequence
  source: /note="Description of Artificial Sequence: Synthetic peptide"
QGIHYYYIDV

SEQ ID NO: 3185 - protein, 110 aa, Artificial Sequence
  source: /note="Description of Artificial Sequence: Synthetic polypeptide"
DIEMTQSPATLSVTPGDRVSLSCRASQSIRDYLHWYQQKSHESPRLLIKYVSQSISGIPSRFSGSGSGSEFTLSINSVEPEDVGVYYCQNGHSLPLTFGSGTKLEIKRTV

SEQ ID NO: 3186 - protein, 11 aa, Artificial Sequence
  source: /note="Description of Artificial Sequence: Synthetic peptide"
RASQSIRDYLH

SEQ ID NO: 3187 - protein, 7 aa, Artificial Sequence
  source: /note="Description of Artificial Sequence: Synthetic peptide"
YVSQSIS

SEQ ID NO: 3188 - protein, 9 aa, Artificial Sequence
  source: /note="Description of Artificial Sequence: Synthetic peptide"
QNGHSLPLT

SEQ ID NO: 3189 - protein, 118 aa, Artificial Sequence
  source: /note="Description of Artificial Sequence: Synthetic polypeptide"
QVQLQQSGAELAKPGASVKMSCKASGYTFTSDWMHWVKQRPGQGLEWIGYINPSTGYTEYNQKFKDKATLTADKSSSTAYMQLRSLTSEDSAVYYCARGSSGSWFAYWGQGTLVTVSA

SEQ ID NO: 3190 - protein, 5 aa, Artificial Sequence
  source: /note="Description of Artificial Sequence: Synthetic peptide"
SDWMH

SEQ ID NO: 3191 - protein, 17 aa, Artificial Sequence
  source: /note="Description of Artificial Sequence: Synthetic peptide"
YINPSTGYTEYNQKFKD

SEQ ID NO: 3192 - protein, 9 aa, Artificial Sequence
  source: /note="Description of Artificial Sequence: Synthetic peptide"
GSSGSWFAY

SEQ ID NO: 3193 - protein, 111 aa, Artificial Sequence
  source: /note="Description of Artificial Sequence: Synthetic polypeptide"
DIVLTQSPASLAVSLGQRATISCRASQSVSTSSYSYMHWYQQKPGQPPKLLIKYASNLESGVPARFSGSGSGTDFTLNIHPVEEEDTATYYCQHSWEIPYTFGGGTKLEIK

SEQ ID NO: 3194 - protein, 15 aa, Artificial Sequence
  source: /note="Description of Artificial Sequence: Synthetic peptide"
RASQSVSTSSYSYMH

SEQ ID NO: 3195 - protein, 7 aa, Artificial Sequence
  source: /note="Description of Artificial Sequence: Synthetic peptide"
YASNLES

SEQ ID NO: 3196 - protein, 9 aa, Artificial Sequence
  source: /note="Description of Artificial Sequence: Synthetic peptide"
QHSWEIPYT

SEQ ID NO: 3197 - protein, 118 aa, Artificial Sequence; identical to SEQ ID NO: 3189
  source: /note="Description of Artificial Sequence: Synthetic polypeptide"

SEQ ID NO: 3198 - protein, 5 aa, Artificial Sequence
  source: /note="Description of Artificial Sequence: Synthetic peptide"
SDWMH

SEQ ID NO: 3199 - protein, 17 aa, Artificial Sequence
  source: /note="Description of Artificial Sequence: Synthetic peptide"
YINPSTGYTEYNQKFKD

SEQ ID NO: 3200 - protein, 9 aa, Artificial Sequence
  source: /note="Description of Artificial Sequence: Synthetic peptide"
GSSGSWFAY

SEQ ID NO: 3201 - protein, 112 aa, Artificial Sequence
  source: /note="Description of Artificial Sequence: Synthetic polypeptide"
DVVMTQTPLTLSVTIGQPASISCKSSQSLLNSDGKTYLNWLLQRPGQSPKRLIYLVSKLDSGVPDRFTGSGSGTDFTLKISRVEAEDLGVYYCWQGTHFPRTFGGGTKLEIK

SEQ ID NO: 3202 - protein, 16 aa, Artificial Sequence
  source: /note="Description of Artificial Sequence: Synthetic peptide"
KSSQSLLNSDGKTYLN

SEQ ID NO: 3203 - protein, 7 aa, Artificial Sequence
  source: /note="Description of Artificial Sequence: Synthetic peptide"
LVSKLDS

SEQ ID NO: 3204 - protein, 9 aa, Artificial Sequence
  source: /note="Description of Artificial Sequence: Synthetic peptide"
WQGTHFPRT

SEQ ID NO: 3205 - protein, 114 aa, Artificial Sequence
  source: /note="Description of Artificial Sequence: Synthetic polypeptide"
EVQLQQSVAELVRPGTSVTISCKASGYTFTNYWLGWVKQRPGHGLEWIGDIFPGGDYPNYNEKFKGKATLTADTSSSTAYMQLSSLTSEDSSVYFCTRGYFDVWGAGTTVTVSS

SEQ ID NO: 3206 - protein, 6 aa, Artificial Sequence
  source: /note="Description of Artificial Sequence: Synthetic peptide"
TNYWLG

SEQ ID NO: 3207 - protein, 17 aa, Artificial Sequence
  source: /note="Description of Artificial Sequence: Synthetic peptide"
DIFPGGDYPNYNEKFKG

SEQ ID NO: 3208 - protein, 7 aa, Artificial Sequence
  source: /note="Description of Artificial Sequence: Synthetic peptide"
TRGYFDV

SEQ ID NO: 3209 - protein, 114 aa, Artificial Sequence
  source: /note="Description of Artificial Sequence: Synthetic polypeptide"
DIQMTQSPSSLSVSAGEKVTMSCKSSQSLLNSENQKNYLAWFQQKPGQPPKMLIYGASTRESGVPDRFTGSGSGTDFTLTISSVQAEDLAVYYCQNDHSYPFTFGSGTKLEIKR

SEQ ID NO: 3210 - protein, 17 aa, Artificial Sequence
  source: /note="Description of Artificial Sequence: Synthetic peptide"
KSSQSLLNSENQKNYLA

SEQ ID NO: 3211 - protein, 7 aa, Artificial Sequence
  source: /note="Description of Artificial Sequence: Synthetic peptide"
GASTRES

SEQ ID NO: 3212 - protein, 7 aa, Artificial Sequence
  source: /note="Description of Artificial Sequence: Synthetic peptide"
QNDHSYP

SEQ ID NO: 3213 - protein, 120 aa, Artificial Sequence; identical to SEQ ID NO: 1052
  source: /note="Description of Artificial Sequence: Synthetic polypeptide"

SEQ ID NO: 3214 - protein, 8 aa, Artificial Sequence
  source: /note="Description of Artificial Sequence: Synthetic peptide"
GYTFTDYN

SEQ ID NO: 3215 - protein, 8 aa, Artificial Sequence
  source: /note="Description of Artificial Sequence: Synthetic peptide"
IYPYIGGS

SEQ ID NO: 3216 - protein, 13 aa, Artificial Sequence
  source: /note="Description of Artificial Sequence: Synthetic peptide"
AREDKTARNAMDY

SEQ ID NO: 3217 - protein, 469 aa, Artificial Sequence
  source: /note="Description of Artificial Sequence: Synthetic polypeptide"
DIQMTQSPSSLSASVGDRVTITCRVSENIYSNLAWYQQKPGKAPKLLIYEATNLAEGVPSRFSGSGSGTDFTLTISSLQPEDFATYYCQHFWGTPYTFGQGTKLEIKGGGGSGGGGSGGGGSQVQLVQSGAEVKKPGASVKVSCKASGYTFTDYNINWVRQAPGQGLEWMGYIYPYIGGSGYAQKFQGRVTMTRDTSTSTVYMELSSLRSEDTAVYYCAREDKTARNAMDYWGQGTLVTVSSESKYGPPCPPCPAPPVAGPSVFLFPPKPKDTLMISRTPEVTCVVVDVKQEDPEVQFNWYVDGVEVHNAKTKPREEQFNSTYRVVSVLTVLHQDWLNGKEYKCKVSNKGLPSSIEKTISKAKGQPREPQVYTLPPSQEQMTKNQVKLTCLVKGFYPSDIAVEWESNGQPENNYKTTPPVLDSDGSFFLYSRLTVDKSRWQEGNVFSCSVMHEALHNHYTQKSLSLSPG

SEQ ID NO: 3218 - protein, 107 aa, Artificial Sequence; identical to SEQ ID NO: 1380
  source: /note="Description of Artificial Sequence: Synthetic polypeptide"

SEQ ID NO: 3219 - protein, 6 aa, Artificial Sequence
  source: /note="Description of Artificial Sequence: Synthetic peptide"
ENIYSN

SEQ ID NO: 3220 - protein, 3 aa, Artificial Sequence
  source: /note="Description of Artificial Sequence: Synthetic peptide"
EAT

SEQ ID NO: 3221 - protein, 9 aa, Artificial Sequence
  source: /note="Description of Artificial Sequence: Synthetic peptide"
QHFWGTPYT

SEQ ID NO: 3222 - protein, 15 aa, Artificial Sequence
  source: /note="Description of Artificial Sequence: Synthetic peptide"
GGGGSGGGGSGGGGS

SEQ ID NO: 3223 - protein, 120 aa, Artificial Sequence; identical to SEQ ID NO: 1052
  source: /note="Description of Artificial Sequence: Synthetic polypeptide"

SEQ ID NO: 3224 - protein, 8 aa, Artificial Sequence
  source: /note="Description of Artificial Sequence: Synthetic peptide"
GYTFTDYN

SEQ ID NO: 3225 - protein, 8 aa, Artificial Sequence
  source: /note="Description of Artificial Sequence: Synthetic peptide"
IYPYIGGS

SEQ ID NO: 3226 - protein, 13 aa, Artificial Sequence
  source: /note="Description of Artificial Sequence: Synthetic peptide"
AREDKTARNAMDY

SEQ ID NO: 3227 - protein, 469 aa, Artificial Sequence
  source: /note="Description of Artificial Sequence: Synthetic polypeptide"
QVQLVQSGAEVKKPGASVKVSCKASGYTFTDYNINWVRQAPGQGLEWMGYIYPYIGGSGYAQKFQGRVTMTRDTSTSTVYMELSSLRSEDTAVYYCAREDKTARNAMDYWGQGTLVTVSSGGGGSGGGGSGGGGSDIQMTQSPSSLSASVGDRVTITCRVSENIYSNLAWYQQKPGKAPKLLIYEATNLAEGVPSRFSGSGSGTDFTLTISSLQPEDFATYYCQHFWGTPYTFGQGTKLEIKESKYGPPCPPCPAPPVAGPSVFLFPPKPKDTLMISRTPEVTCVVVDVKQEDPEVQFNWYVDGVEVHNAKTKPREEQFNSTYRVVSVLTVLHQDWLNGKEYKCKVSNKGLPSSIEKTISKAKGQPREPQVYTLPPSQEQMTKNQVKLTCLVKGFYPSDIAVEWESNGQPENNYKTTPPVLDSDGSFFLYSRLTVDKSRWQEGNVFSCSVMHEALHNHYTQKSLSLSPG

SEQ ID NO: 3228 - protein, 107 aa, Artificial Sequence; identical to SEQ ID NO: 1380
  source: /note="Description of Artificial Sequence: Synthetic polypeptide"

SEQ ID NO: 3229 - protein, 6 aa, Artificial Sequence
  source: /note="Description of Artificial Sequence: Synthetic peptide"
ENIYSN

SEQ ID NO: 3230 - protein, 3 aa, Artificial Sequence
  source: /note="Description of Artificial Sequence: Synthetic peptide"
EAT

SEQ ID NO: 3231 - protein, 9 aa, Artificial Sequence
  source: /note="Description of Artificial Sequence: Synthetic peptide"
QHFWGTPYT

SEQ ID NO: 3232 - protein, 15 aa, Artificial Sequence
  source: /note="Description of Artificial Sequence: Synthetic peptide"
GGGGSGGGGSGGGGS

SEQ ID NO: 3233 - protein, 120 aa, Artificial Sequence; identical to SEQ ID NO: 1052
  source: /note="Description of Artificial Sequence: Synthetic polypeptide"

SEQ ID NO: 3234 - protein, 8 aa, Artificial Sequence
  source: /note="Description of Artificial Sequence: Synthetic peptide"
GYTFTDYN

SEQ ID NO: 3235 - protein, 8 aa, Artificial Sequence
  source: /note="Description of Artificial Sequence: Synthetic peptide"
IYPYIGGS

SEQ ID NO: 3236 - protein, 13 aa, Artificial Sequence
  source: /note="Description of Artificial Sequence: Synthetic peptide"
AREDKTARNAMDY

SEQ ID NO: 3237 - protein, 469 aa, Artificial Sequence
  source: /note="Description of Artificial Sequence: Synthetic polypeptide"
DIQMTQSPSSLSASVGDRVTITCRVSENIYSNLAWYQQKPGKAPKLLIYEATNLAEGVPSRFSGSGSGTDFTLTISSLQPEDFATYYCQHFWGTPYTFGQGTKLEIKGGGGSGGGGSGGGGSQVQLVQSGAEVKKPGASVKVSCKASGYTFTDYNINWVRQAPGQGLEWMGYIYPYIGGSGYAQKFQGRVTMTRDTSTSTVYMELSSLRSEDTAVYYCAREDKTARNAMDYWGQGTLVTVSSESKYGPPCPPCPAPPVAGPSVFLFPPKPKDTLMISRTPEVTCVVVDVKQEDPEVQFNWYVDGVEVHNAKTKPREEEFNSTYRVVSVLTVLHQDWLNGKEYKCKVSNKGLPSSIEKTISKAKGQPREPQVYTLPPSQEEMTKNQVSLTCDVSGFYPSDIAVEWESDGQPENNYKTTPPVLDSDGSFFLYSRLTVDKSRWEEGDVFSCSVMHEALHNHYTQKSLSLSPG

SEQ ID NO: 3238 - protein, 107 aa, Artificial Sequence; identical to SEQ ID NO: 1380
  source: /note="Description of Artificial Sequence: Synthetic polypeptide"

SEQ ID NO: 3239 - protein, 6 aa, Artificial Sequence
  source: /note="Description of Artificial Sequence: Synthetic peptide"
ENIYSN

SEQ ID NO: 3240 - protein, 3 aa, Artificial Sequence
  source: /note="Description of Artificial Sequence: Synthetic peptide"
EAT

SEQ ID NO: 3241 - protein, 9 aa, Artificial Sequence
  source: /note="Description of Artificial Sequence: Synthetic peptide"
QHFWGTPYT

SEQ ID NO: 3242 - protein, 15 aa, Artificial Sequence
  source: /note="Description of Artificial Sequence: Synthetic peptide"
GGGGSGGGGSGGGGS

SEQ ID NO: 3243 - protein, 120 aa, Artificial Sequence; identical to SEQ ID NO: 1052
  source: /note="Description of Artificial Sequence: Synthetic polypeptide"

SEQ ID NO: 3244 - protein, 8 aa, Artificial Sequence
  source: /note="Description of Artificial Sequence: Synthetic peptide"
GYTFTDYN

SEQ ID NO: 3245 - protein, 8 aa, Artificial Sequence
  source: /note="Description of Artificial Sequence: Synthetic peptide"
IYPYIGGS

SEQ ID NO: 3246 - protein, 13 aa, Artificial Sequence
  source: /note="Description of Artificial Sequence: Synthetic peptide"
AREDKTARNAMDY

SEQ ID NO: 3247 - protein, 469 aa, Artificial Sequence
  source: /note="Description of Artificial Sequence: Synthetic polypeptide"
QVQLVQSGAEVKKPGASVKVSCKASGYTFTDYNINWVRQAPGQGLEWMGYIYPYIGGSGYAQKFQGRVTMTRDTSTSTVYMELSSLRSEDTAVYYCAREDKTARNAMDYWGQGTLVTVSSGGGGSGGGGSGGGGSDIQMTQSPSSLSASVGDRVTITCRVSENIYSNLAWYQQKPGKAPKLLIYEATNLAEGVPSRFSGSGSGTDFTLTISSLQPEDFATYYCQHFWGTPYTFGQGTKLEIKESKYGPPCPPCPAPPVAGPSVFLFPPKPKDTLMISRTPEVTCVVVDVKQEDPEVQFNWYVDGVEVHNAKTKPREEEFNSTYRVVSVLTVLHQDWLNGKEYKCKVSNKGLPSSIEKTISKAKGQPREPQVYTLPPSQEEMTKNQVSLTCDVSGFYPSDIAVEWESDGQPENNYKTTPPVLDSDGSFFLYSRLTVDKSRWEEGDVFSCSVMHEALHNHYTQKSLSLSPG

SEQ ID NO: 3248 - protein, 107 aa, Artificial Sequence; identical to SEQ ID NO: 1380
  source: /note="Description of Artificial Sequence: Synthetic polypeptide"

SEQ ID NO: 3249 - protein, 6 aa, Artificial Sequence
  source: /note="Description of Artificial Sequence: Synthetic peptide"
ENIYSN

SEQ ID NO: 3250 - protein, 3 aa, Artificial Sequence
  source: /note="Description of Artificial Sequence: Synthetic peptide"
EAT

SEQ ID NO: 3251 - protein, 9 aa, Artificial Sequence
  source: /note="Description of Artificial Sequence: Synthetic peptide"
QHFWGTPYT

SEQ ID NO: 3252 - protein, 15 aa, Artificial Sequence
  source: /note="Description of Artificial Sequence: Synthetic peptide"
GGGGSGGGGSGGGGS

SEQ ID NO: 3253 - protein, 120 aa, Artificial Sequence; identical to SEQ ID NO: 1052
  source: /note="Description of Artificial Sequence: Synthetic polypeptide"

SEQ ID NO: 3254 - protein, 8 aa, Artificial Sequence
  source: /note="Description of Artificial Sequence: Synthetic peptide"
GYTFTDYN

SEQ ID NO: 3255 - protein, 8 aa, Artificial Sequence
  source: /note="Description of Artificial Sequence: Synthetic peptide"
IYPYIGGS

SEQ ID NO: 3256 - protein, 13 aa, Artificial Sequence
  source: /note="Description of Artificial Sequence: Synthetic peptide"
AREDKTARNAMDY

SEQ ID NO: 3257 - protein, 445 aa, Artificial Sequence
  source: /note="Description of Artificial Sequence: Synthetic polypeptide"
QVQLVQSGAEVKKPGASVKVSCKASGYTFTDYNINWVRQAPGQGLEWMGYIYPYIGGSGYAQKFQGRVTMTRDTSTSTVYMELSSLRSEDTAVYYCAREDKTARNAMDYWGQGTLVTVSSASTKGPSVFPLAPCSRSTSESTAALGCLVKDYFPEPVTVSWNSGALTSGVHTFPAVLQSSGLYSLSSVVTVPSSSLGTKTYTCNVDHKPSNTKVDKRVESKYGPPCPPCPAPPVAGPSVFLFPPKPKDTLMISRTPEVTCVVVDVKQEDPEVQFNWYVDGVEVHNAKTKPREEQFNSTYRVVSVLTVLHQDWLNGKEYKCKVSNKGLPSSIEKTISKAKGQPREPQVYTLPPSQEQMTKNQVKLTCLVKGFYPSDIAVEWESNGQPENNYKTTPPVLDSDGSFFLYSRLTVDKSRWQEGNVFSCSVMHEALHNHYTQKSLSLSPG

SEQ ID NO: 3258 - protein, 107 aa, Artificial Sequence; identical to SEQ ID NO: 1380
  source: /note="Description of Artificial Sequence: Synthetic polypeptide"

SEQ ID NO: 3259 - protein, 6 aa, Artificial Sequence
  source: /note="Description of Artificial Sequence: Synthetic peptide"
ENIYSN

SEQ ID NO: 3260 - protein, 3 aa, Artificial Sequence
  source: /note="Description of Artificial Sequence: Synthetic peptide"
EAT

SEQ ID NO: 3261 - protein, 9 aa, Artificial Sequence
  source: /note="Description of Artificial Sequence: Synthetic peptide"
QHFWGTPYT

SEQ ID NO: 3262 - protein, 214 aa, Artificial Sequence; identical to SEQ ID NO: 1548
  source: /note="Description of Artificial Sequence: Synthetic polypeptide"

SEQ ID NO: 3263 - protein, 120 aa, Artificial Sequence; identical to SEQ ID NO: 1052
  source: /note="Description of Artificial Sequence: Synthetic polypeptide"

SEQ ID NO: 3264 - protein, 8 aa, Artificial Sequence
  source: /note="Description of Artificial Sequence: Synthetic peptide"
GYTFTDYN

SEQ ID NO: 3265 - protein, 8 aa, Artificial Sequence
  source: /note="Description of Artificial Sequence: Synthetic peptide"
IYPYIGGS

SEQ ID NO: 3266 - protein, 13 aa, Artificial Sequence
  source: /note="Description of Artificial Sequence: Synthetic peptide"
AREDKTARNAMDY

SEQ ID NO: 3267 - protein, 445 aa, Artificial Sequence
  source: /note="Description of Artificial Sequence: Synthetic polypeptide"
QVQLVQSGAEVKKPGASVKVSCKASGYTFTDYNINWVRQAPGQGLEWMGYIYPYIGGSGYAQKFQGRVTMTRDTSTSTVYMELSSLRSEDTAVYYCAREDKTARNAMDYWGQGTLVTVSSASTKGPSVFPLAPCSRSTSESTAALGCLVKDYFPEPVTVSWNSGALTSGVHTFPAVLQSSGLYSLSSVVTVPSSSLGTKTYTCNVDHKPSDTKVDKRVESKYGPPCPPCPAPPVAGPSVFLFPPKPKDTLMISRTPEVTCVVVDVKQEDPEVQFNWYVDGVEVHNAKTKPREEEFNSTYRVVSVLTVLHQDWLNGKEYKCKVSNKGLPSSIEKTISKAKGQPREPQVYTLPPSQEEMTKNQVSLTCDVSGFYPSDIAVEWESDGQPENNYKTTPPVLDSDGSFFLYSRLTVDKSRWEEGDVFSCSVMHEALHNHYTQKSLSLSPG

SEQ ID NO: 3268 - protein, 107 aa, Artificial Sequence; identical to SEQ ID NO: 1380
  source: /note="Description of Artificial Sequence: Synthetic polypeptide"

SEQ ID NO: 3269 - protein, 6 aa, Artificial Sequence
  source: /note="Description of Artificial Sequence: Synthetic peptide"
ENIYSN

SEQ ID NO: 3270 - protein, 3 aa, Artificial Sequence
  source: /note="Description of Artificial Sequence: Synthetic peptide"
EAT

SEQ ID NO: 3271 - protein, 9 aa, Artificial Sequence
  source: /note="Description of Artificial Sequence: Synthetic peptide"
QHFWGTPYT

SEQ ID NO: 3272 - protein, 214 aa, Artificial Sequence; identical to SEQ ID NO: 1548
  source: /note="Description of Artificial Sequence: Synthetic polypeptide"

SEQ ID NO: 3273 - protein, 120 aa, Artificial Sequence; identical to SEQ ID NO: 1052
  source: /note="Description of Artificial Sequence: Synthetic polypeptide"

SEQ ID NO: 3274 - protein, 8 aa, Artificial Sequence
  source: /note="Description of Artificial Sequence: Synthetic peptide"
GYTFTDYN

SEQ ID NO: 3275 - protein, 8 aa, Artificial Sequence
  source: /note="Description of Artificial Sequence: Synthetic peptide"
IYPYIGGS

SEQ ID NO: 3276 - protein, 13 aa, Artificial Sequence
  source: /note="Description of Artificial Sequence: Synthetic peptide"
AREDKTARNAMDY

SEQ ID NO: 3277 - protein, 455 aa, Artificial Sequence
  source: /note="Description of Artificial Sequence: Synthetic polypeptide"
QVQLVQSGAEVKKPGASVKVSCKASGYTFTDYNINWVRQAPGQGLEWMGYIYPYIGGSGYAQKFQGRVTMTRDTSTSTVYMELSSLRSEDTAVYYCAREDKTARNAMDYWGQGTLVTVSSASVAAPSVFIFPPSDEQLKSGTASVVCLLNNFYPREAKVQWKVDNALQSGNSQESVTEQDSKDSTYSLSSTLTLSKADYEKHKVYACEVTHQGLSSPVTKSFNRGECESKYGPPCPPCPAPEFLGGPSVFLFPPKPKDTLMISRTPEVTCVVVDVSQEDPEVQFNWYVDGVEVHNAKTKPREEQFNSTYRVVSVLTVLHQDWLNGKEYKCKVSNKGLPSSIEKTISKAKGQPREPQVCTLPPSQDELTKNQVSLSCAVKGFYPSDIAVEWESNGQPENNYKTTPPVLDSDGSFFLVSRLTVDKSRWQEGNVFSCSVMHEALHNHYTQKSLSLSPG

SEQ ID NO: 3278 - protein, 107 aa, Artificial Sequence; identical to SEQ ID NO: 1380
  source: /note="Description of Artificial Sequence: Synthetic polypeptide"

SEQ ID NO: 3279 - protein, 6 aa, Artificial Sequence
  source: /note="Description of Artificial Sequence: Synthetic peptide"
ENIYSN

SEQ ID NO: 3280 - protein, 3 aa, Artificial Sequence
  source: /note="Description of Artificial Sequence: Synthetic peptide"
EAT

SEQ ID NO: 3281 - protein, 9 aa, Artificial Sequence
  source: /note="Description of Artificial Sequence: Synthetic peptide"
QHFWGTPYT

SEQ ID NO: 3282 - protein, 207 aa, Artificial Sequence
  source: /note="Description of Artificial Sequence: Synthetic polypeptide"
DIQMTQSPSSLSASVGDRVTITCRVSENIYSNLAWYQQKPGKAPKLLIYEATNLAEGVPSRFSGSGSGTDFTLTISSLQPEDFATYYCQHFWGTPYTFGQGTKLEIKSSASTKGPSVFPLAPCSRSTSESTAALGCLVKDYFPEPVTVSWNSGALTSGVHTFPAVLQSSGLYSLSSVVTVPSSSLGTKTYTCNVDHKPSNTKVDKRV

SEQ ID NO: 3283 - protein, 120 aa, Artificial Sequence; identical to SEQ ID NO: 1052
  source: /note="Description of Artificial Sequence: Synthetic polypeptide"

SEQ ID NO: 3284 - protein, 8 aa, Artificial Sequence
  source: /note="Description of Artificial Sequence: Synthetic peptide"
GYTFTDYN

SEQ ID NO: 3285 - protein, 8 aa, Artificial Sequence
  source: /note="Description of Artificial Sequence: Synthetic peptide"
IYPYIGGS

SEQ ID NO: 3286 - protein, 13 aa, Artificial Sequence
  source: /note="Description of Artificial Sequence: Synthetic peptide"
AREDKTARNAMDY

SEQ ID NO: 3287 - protein, 455 aa, Artificial Sequence
  source: /note="Description of Artificial Sequence: Synthetic polypeptide"
QVQLVQSGAEVKKPGASVKVSCKASGYTFTDYNINWVRQAPGQGLEWMGYIYPYIGGSGYAQKFQGRVTMTRDTSTSTVYMELSSLRSEDTAVYYCAREDKTARNAMDYWGQGTLVTVSSASVAAPSVFIFPPSDEQLKSGTASVVCLLNNFYPREAKVQWKVDNALQSGNSQESVTEQDSKDSTYSLSSTLTLSKADYEKHKVYACEVTHQGLSSPVTKSFNRGECESKYGPPCPPCPAPEFLGGPSVFLFPPKPKDTLMISRTPEVTCVVVDVSQEDPEVQFNWYVDGVEVHNAKTKPREEQFNSTYRVVSVLTVLHQDWLNGKEYKCKVSNKGLPSSIEKTISKAKGQPREPQVYTLPPCQDELTKNQVSLWCLVKGFYPSDIAVEWESNGQPENNYKTTPPVLDSDGSFFLYSRLTVDKSRWQEGNVFSCSVMHEALHNHYTQKSLSLSPG

SEQ ID NO: 3288 - protein, 107 aa, Artificial Sequence; identical to SEQ ID NO: 1380
  source: /note="Description of Artificial Sequence: Synthetic polypeptide"

SEQ ID NO: 3289 - protein, 6 aa, Artificial Sequence
  source: /note="Description of Artificial Sequence: Synthetic peptide"
ENIYSN

SEQ ID NO: 3290 - protein, 3 aa, Artificial Sequence
  source: /note="Description of Artificial Sequence: Synthetic peptide"
EAT

SEQ ID NO: 3291 - protein, 9 aa, Artificial Sequence
  source: /note="Description of Artificial Sequence: Synthetic peptide"
QHFWGTPYT

SEQ ID NO: 3292 - protein, 207 aa, Artificial Sequence; identical to SEQ ID NO: 3282
  source: /note="Description of Artificial Sequence: Synthetic polypeptide"

SEQ ID NO: 3293 - protein, 120 aa, Artificial Sequence; identical to SEQ ID NO: 1052
  source: /note="Description of Artificial Sequence: Synthetic polypeptide"

SEQ ID NO: 3294 - protein, 8 aa, Artificial Sequence
  source: /note="Description of Artificial Sequence: Synthetic peptide"
GYTFTDYN

SEQ ID NO: 3295 - protein, 8 aa, Artificial Sequence
  source: /note="Description of Artificial Sequence: Synthetic peptide"
IYPYIGGS

SEQ ID NO: 3296 - protein, 13 aa, Artificial Sequence
  source: /note="Description of Artificial Sequence: Synthetic peptide"
AREDKTARNAMDY

SEQ ID NO: 3297 - protein, 448 aa, Artificial Sequence
  source: /note="Description of Artificial Sequence: Synthetic polypeptide"
QVQLVQSGAEVKKPGASVKVSCKASGYTFTDYNINWVRQAPGQGLEWMGYIYPYIGGSGYAQKFQGRVTMTRDTSTSTVYMELSSLRSEDTAVYYCAREDKTARNAMDYWGQGTLVTVSSASASTKGPSVFPLAPCSRSTSESTAALGCLVKDYFPEPVTVSWNSGALTSGVHTFPAVLQSSGLYSLSSVVTVPSSSLGTKTYTCNVDHKPSNTKVDKRVESKYGPPCPPCPAPEFLGGPSVFLFPPKPKDTLMISRTPEVTCVVVDVSQEDPEVQFNWYVDGVEVHNAKTKPREEQFNSTYRVVSVLTVLHQDWLNGKEYKCKVSNKGLPSSIEKTISKAKGQPREPQVCTLPPSQDELTKNQVSLSCAVKGFYPSDIAVEWESNGQPENNYKTTPPVLDSDGSFFLVSRLTVDKSRWQEGNVFSCSVMHEALHNHYTQKSLSLSPG

SEQ ID NO: 3298 - protein, 107 aa, Artificial Sequence; identical to SEQ ID NO: 1380
  source: /note="Description of Artificial Sequence: Synthetic polypeptide"

SEQ ID NO: 3299 - protein, 6 aa, Artificial Sequence
  source: /note="Description of Artificial Sequence: Synthetic peptide"
ENIYSN

SEQ ID NO: 3300 - protein, 3 aa, Artificial Sequence
  source: /note="Description of Artificial Sequence: Synthetic peptide"
EAT

SEQ ID NO: 3301 - protein, 9 aa, Artificial Sequence
  source: /note="Description of Artificial Sequence: Synthetic peptide"
QHFWGTPYT

SEQ ID NO: 3302 - protein, 214 aa, Artificial Sequence; identical to SEQ ID NO: 1548
  source: /note="Description of Artificial Sequence: Synthetic polypeptide"

SEQ ID NO: 3303 - protein, 120 aa, Artificial Sequence; identical to SEQ ID NO: 1052
  source: /note="Description of Artificial Sequence: Synthetic polypeptide"

SEQ ID NO: 3304 - protein, 8 aa, Artificial Sequence
  source: /note="Description of Artificial Sequence: Synthetic peptide"
GYTFTDYN

SEQ ID NO: 3305 - protein, 8 aa, Artificial Sequence
  source: /note="Description of Artificial Sequence: Synthetic peptide"
IYPYIGGS

SEQ ID NO: 3306 - protein, 13 aa, Artificial Sequence
  source: /note="Description of Artificial Sequence: Synthetic peptide"
AREDKTARNAMDY

SEQ ID NO: 3307 - protein, 448 aa, Artificial Sequence
  source: /note="Description of Artificial Sequence: Synthetic polypeptide"
QVQLVQSGAEVKKPGASVKVSCKASGYTFTDYNINWVRQAPGQGLEWMGYIYPYIGGSGYAQKFQGRVTMTRDTSTSTVYMELSSLRSEDTAVYYCAREDKTARNAMDYWGQGTLVTVSSASASTKGPSVFPLAPCSRSTSESTAALGCLVKDYFPEPVTVSWNSGALTSGVHTFPAVLQSSGLYSLSSVVTVPSSSLGTKTYTCNVDHKPSNTKVDKRVESKYGPPCPPCPAPEFLGGPSVFLFPPKPKDTLMISRTPEVTCVVVDVSQEDPEVQFNWYVDGVEVHNAKTKPREEQFNSTYRVVSVLTVLHQDWLNGKEYKCKVSNKGLPSSIEKTISKAKGQPREPQVYTLPPCQDELTKNQVSLWCLVKGFYPSDIAVEWESNGQPENNYKTTPPVLDSDGSFFLYSRLTVDKSRWQEGNVFSCSVMHEALHNHYTQKSLSLSPG

SEQ ID NO: 3308 - protein, 107 aa, Artificial Sequence; identical to SEQ ID NO: 1380
  source: /note="Description of Artificial Sequence: Synthetic polypeptide"

SEQ ID NO: 3309 - protein, 6 aa, Artificial Sequence
  source: /note="Description of Artificial Sequence: Synthetic peptide"
ENIYSN

SEQ ID NO: 3310 - protein, 3 aa, Artificial Sequence
  source: /note="Description of Artificial Sequence: Synthetic peptide"
EAT

SEQ ID NO: 3311 - protein, 9 aa, Artificial Sequence
  source: /note="Description of Artificial Sequence: Synthetic peptide"
QHFWGTPYT

SEQ ID NO: 3312 - protein, 214 aa, Artificial Sequence; identical to SEQ ID NO: 1548
  source: /note="Description of Artificial Sequence: Synthetic polypeptide"

SEQ ID NO: 3313 - protein, 120 aa, Artificial Sequence; identical to SEQ ID NO: 1052
  source: /note="Description of Artificial Sequence: Synthetic polypeptide"

SEQ ID NO: 3314 - protein, 8 aa, Artificial Sequence
  source: /note="Description of Artificial Sequence: Synthetic peptide"
GYTFTDYN

SEQ ID NO: 3315 - protein, 8 aa, Artificial Sequence
  source: /note="Description of Artificial Sequence: Synthetic peptide"
IYPYIGGS

SEQ ID NO: 3316 - protein, 13 aa, Artificial Sequence
  source: /note="Description of Artificial Sequence: Synthetic peptide"
AREDKTARNAMDY

SEQ ID NO: 3317 - protein, 469 aa, Artificial Sequence
  source: /note="Description of Artificial Sequence: Synthetic polypeptide"
DIQMTQSPSSLSASVGDRVTITCRVSENIYDVLAWYQQKPGKAPKLLIYEATNLAEGVPSRFSGSGSGTDFTLTISSLQPEDFATYYCQHFWGTPYTFGQGTKLEIKGGGGSGGGGSGGGGSQVQLVQSGAEVKKPGASVKVSCKASGYTFTDYNINWVRQAPGQGLEWMGYIYPYIGGSGYAQKFQGRVTMTRDTSTSTVYMELSSLRSEDTAVYYCAREDKTARNAMDYWGQGTLVTVSSESKYGPPCPPCPAPPVAGPSVFLFPPKPKDTLMISRTPEVTCVVVDVKQEDPEVQFNWYVDGVEVHNAKTKPREEQFNSTYRVVSVLTVLHQDWLNGKEYKCKVSNKGLPSSIEKTISKAKGQPREPQVYTLPPSQEQMTKNQVKLTCLVKGFYPSDIAVEWESNGQPENNYKTTPPVLDSDGSFFLYSRLTVDKSRWQEGNVFSCSVMHEALHNHYTQKSLSLSPG

SEQ ID NO: 3318 - protein, 107 aa, Artificial Sequence; identical to SEQ ID NO: 1056
  source: /note="Description of Artificial Sequence: Synthetic polypeptide"

SEQ ID NO: 3319 - protein, 6 aa, Artificial Sequence
  source: /note="Description of Artificial Sequence: Synthetic peptide"
ENIYDV

SEQ ID NO: 3320 - protein, 3 aa, Artificial Sequence
  source: /note="Description of Artificial Sequence: Synthetic peptide"
EAT

SEQ ID NO: 3321 - protein, 9 aa, Artificial Sequence
  source: /note="Description of Artificial Sequence: Synthetic peptide"
QHFWGTPYT

SEQ ID NO: 3322 - protein, 15 aa, Artificial Sequence
  source: /note="Description of Artificial Sequence: Synthetic peptide"
GGGGSGGGGSGGGGS

SEQ ID NO: 3323 - protein, 120 aa, Artificial Sequence; identical to SEQ ID NO: 1052
  source: /note="Description of Artificial Sequence: Synthetic polypeptide"

SEQ ID NO: 3324 - protein, 8 aa, Artificial Sequence
  source: /note="Description of Artificial Sequence: Synthetic peptide"
GYTFTDYN

SEQ ID NO: 3325 - protein, 8 aa, Artificial Sequence
  source: /note="Description of Artificial Sequence: Synthetic peptide"
IYPYIGGS

SEQ ID NO: 3326 - protein, 13 aa, Artificial Sequence
  source: /note="Description of Artificial Sequence: Synthetic peptide"
AREDKTARNAMDY

SEQ ID NO: 3327 - protein, 469 aa, Artificial Sequence
  source: /note="Description of Artificial Sequence: Synthetic polypeptide"
QVQLVQSGAEVKKPGASVKVSCKASGYTFTDYNINWVRQAPGQGLEWMGYIYPYIGGSGYAQKFQGRVTMTRDTSTSTVYMELSSLRSEDTAVYYCAREDKTARNAMDYWGQGTLVTVSSGGGGSGGGGSGGGGSDIQMTQSPSSLSASVGDRVTITCRVSENIYDVLAWYQQKPGKAPKLLIYEATNLAEGVPSRFSGSGSGTDFTLTISSLQPEDFATYYCQHFWGTPYTFGQGTKLEIKESKYGPPCPPCPAPPVAGPSVFLFPPKPKDTLMISRTPEVTCVVVDVKQEDPEVQFNWYVDGVEVHNAKTKPREEQFNSTYRVVSVLTVLHQDWLNGKEYKCKVSNKGLPSSIEKTISKAKGQPREPQVYTLPPSQEQMTKNQVKLTCLVKGFYPSDIAVEWESNGQPENNYKTTPPVLDSDGSFFLYSRLTVDKSRWQEGNVFSCSVMHEALHNHYTQKSLSLSPG

SEQ ID NO: 3328 - protein, 107 aa, Artificial Sequence; identical to SEQ ID NO: 1056
  source: /note="Description of Artificial Sequence: Synthetic polypeptide"

SEQ ID NO: 3329 - protein, 6 aa, Artificial Sequence
  source: /note="Description of Artificial Sequence: Synthetic peptide"
ENIYDV

SEQ ID NO: 3330 - protein, 3 aa, Artificial Sequence
  source: /note="Description of Artificial Sequence: Synthetic peptide"
EAT

SEQ ID NO: 3331 - protein, 9 aa, Artificial Sequence
  source: /note="Description of Artificial Sequence: Synthetic peptide"
QHFWGTPYT

SEQ ID NO: 3332 - protein, 15 aa, Artificial Sequence
  source: /note="Description of Artificial Sequence: Synthetic peptide"
GGGGSGGGGSGGGGS

SEQ ID NO: 3333 - protein, 120 aa, Artificial Sequence; identical to SEQ ID NO: 1052
  source: /note="Description of Artificial Sequence: Synthetic polypeptide"

SEQ ID NO: 3334 - protein, 8 aa, Artificial Sequence
  source: /note="Description of Artificial Sequence: Synthetic peptide"
GYTFTDYN

SEQ ID NO: 3335 - protein, 8 aa, Artificial Sequence
  source: /note="Description of Artificial Sequence: Synthetic peptide"
IYPYIGGS

SEQ ID NO: 3336 - protein, 13 aa, Artificial Sequence
  source: /note="Description of Artificial Sequence: Synthetic peptide"
AREDKTARNAMDY

SEQ ID NO: 3337 - protein, 469 aa, Artificial Sequence
  source: /note="Description of Artificial Sequence: Synthetic polypeptide"
DIQMTQSPSSLSASVGDRVTITCRVSENIYDVLAWYQQKPGKAPKLLIYEATNLAEGVPSRFSGSGSGTDFTLTISSLQPEDFATYYCQHFWGTPYTFGQGTKLEIKGGGGSGGGGSGGGGSQVQLVQSGAEVKKPGASVKVSCKASGYTFTDYNINWVRQAPGQGLEWMGYIYPYIGGSGYAQKFQGRVTMTRDTSTSTVYMELSSLRSEDTAVYYCAREDKTARNAMDYWGQGTLVTVSSESKYGPPCPPCPAPPVAGPSVFLFPPKPKDTLMISRTPEVTCVVVDVKQEDPEVQFNWYVDGVEVHNAKTKPREEEFNSTYRVVSVLTVLHQDWLNGKEYKCKVSNKGLPSSIEKTISKAKGQPREPQVYTLPPSQEEMTKNQVSLTCDVSGFYPSDIAVEWESDGQPENNYKTTPPVLDSDGSFFLYSRLTVDKSRWEEGDVFSCSVMHEALHNHYTQKSLSLSPG

SEQ ID NO: 3338 - protein, 107 aa, Artificial Sequence; identical to SEQ ID NO: 1056
  source: /note="Description of Artificial Sequence: Synthetic polypeptide"

SEQ ID NO: 3339 - protein, 6 aa, Artificial Sequence
  source: /note="Description of Artificial Sequence: Synthetic peptide"
ENIYDV

SEQ ID NO: 3340 - protein, 3 aa, Artificial Sequence
  source: /note="Description of Artificial Sequence: Synthetic peptide"
EAT

SEQ ID NO: 3341 - protein, 9 aa, Artificial Sequence
  source: /note="Description of Artificial Sequence: Synthetic peptide"
QHFWGTPYT

SEQ ID NO: 3342 - protein, 15 aa, Artificial Sequence
  source: /note="Description of Artificial Sequence: Synthetic peptide"
GGGGSGGGGSGGGGS

SEQ ID NO: 3343 - protein, 120 aa, Artificial Sequence; identical to SEQ ID NO: 1052
  source: /note="Description of Artificial Sequence: Synthetic polypeptide"

SEQ ID NO: 3344 - protein, 8 aa, Artificial Sequence
  source: /note="Description of Artificial Sequence: Synthetic peptide"
GYTFTDYN

SEQ ID NO: 3345 - protein, 8 aa, Artificial Sequence
  source: /note="Description of Artificial Sequence: Synthetic peptide"
IYPYIGGS

SEQ ID NO: 3346 - protein, 13 aa, Artificial Sequence
  source: /note="Description of Artificial Sequence: Synthetic peptide"
AREDKTARNAMDY

SEQ ID NO: 3347 - protein, 469 aa, Artificial Sequence
  source: /note="Description of Artificial Sequence: Synthetic polypeptide"
QVQLVQSGAEVKKPGASVKVSCKASGYTFTDYNINWVRQAPGQGLEWMGYIYPYIGGSGYAQKFQGRVTMTRDTSTSTVYMELSSLRSEDTAVYYCAREDKTARNAMDYWGQGTLVTVSSGGGGSGGGGSGGGGSDIQMTQSPSSLSASVGDRVTITCRVSENIYDVLAWYQQKPGKAPKLLIYEATNLAEGVPSRFSGSGSGTDFTLTISSLQPEDFATYYCQHFWGTPYTFGQGTKLEIKESKYGPPCPPCPAPPVAGPSVFLFPPKPKDTLMISRTPEVTCVVVDVKQEDPEVQFNWYVDGVEVHNAKTKPREEEFNSTYRVVSVLTVLHQDWLNGKEYKCKVSNKGLPSSIEKTISKAKGQPREPQVYTLPPSQEEMTKNQVSLTCDVSGFYPSDIAVEWESDGQPENNYKTTPPVLDSDGSFFLYSRLTVDKSRWEEGDVFSCSVMHEALHNHYTQKSLSLSPG

SEQ ID NO: 3348 - protein, 107 aa, Artificial Sequence; identical to SEQ ID NO: 1056
  source: /note="Description of Artificial Sequence: Synthetic polypeptide"

SEQ ID NO: 3349 - protein, 6 aa, Artificial Sequence
  source: /note="Description of Artificial Sequence: Synthetic peptide"
ENIYDV

SEQ ID NO: 3350 - protein, 3 aa, Artificial Sequence
  source: /note="Description of Artificial Sequence: Synthetic peptide"
EAT

SEQ ID NO: 3351 - protein, 9 aa, Artificial Sequence
  source: /note="Description of Artificial Sequence: Synthetic peptide"
QHFWGTPYT

SEQ ID NO: 3352 - protein, 15 aa, Artificial Sequence
  source: /note="Description of Artificial Sequence: Synthetic peptide"
GGGGSGGGGSGGGGS

SEQ ID NO: 3353 - protein, 120 aa, Artificial Sequence; identical to SEQ ID NO: 1052
  source: /note="Description of Artificial Sequence: Synthetic polypeptide"

SEQ ID NO: 3354 - protein, 8 aa, Artificial Sequence
  source: /note="Description of Artificial Sequence: Synthetic peptide"
GYTFTDYN

SEQ ID NO: 3355 - protein, 8 aa, Artificial Sequence
  source: /note="Description of Artificial Sequence: Synthetic peptide"
IYPYIGGS

SEQ ID NO: 3356 - protein, 13 aa, Artificial Sequence
  source: /note="Description of Artificial Sequence: Synthetic peptide"
AREDKTARNAMDY

SEQ ID NO: 3357 - protein, 445 aa, Artificial Sequence; identical to SEQ ID NO: 3257
  source: /note="Description of Artificial Sequence: Synthetic polypeptide"

SEQ ID NO: 3358 - protein, 107 aa, Artificial Sequence; identical to SEQ ID NO: 1056
  source: /note="Description of Artificial Sequence: Synthetic polypeptide"

SEQ ID NO: 3359 - protein, 6 aa, Artificial Sequence
  source: /note="Description of Artificial Sequence: Synthetic peptide"
ENIYDV

SEQ ID NO: 3360 - protein, 3 aa, Artificial Sequence
  source: /note="Description of Artificial Sequence: Synthetic peptide"
EAT

SEQ ID NO: 3361 - protein, 9 aa, Artificial Sequence
  source: /note="Description of Artificial Sequence: Synthetic peptide"
QHFWGTPYT

SEQ ID NO: 3362 - protein, 214 aa, Artificial Sequence
  source: /note="Description of Artificial Sequence: Synthetic polypeptide"
DIQMTQSPSSLSASVGDRVTITCRVSENIYDVLAWYQQKPGKAPKLLIYEATNLAEGVPSRFSGSGSGTDFTLTISSLQPEDFATYYCQHFWGTPYTFGQGTKLEIKRTVAAPSVFIFPPSDEQLKSGTASVVCLLNNFYPREAKVQWKVDNALQSGNSQESVTEQDSKDSTYSLSSTLTLSKADYEKHKVYACEVTHQGLSSPVTKSFNRGEC

SEQ ID NO: 3363 - protein, 120 aa, Artificial Sequence; identical to SEQ ID NO: 1052
  source: /note="Description of Artificial Sequence: Synthetic polypeptide"

SEQ ID NO: 3364 - protein, 8 aa, Artificial Sequence
  source: /note="Description of Artificial Sequence: Synthetic peptide"
GYTFTDYN

SEQ ID NO: 3365 - protein, 8 aa, Artificial Sequence
  source: /note="Description of Artificial Sequence: Synthetic peptide"
IYPYIGGS

SEQ ID NO: 3366 - protein, 13 aa, Artificial Sequence
  source: /note="Description of Artificial Sequence: Synthetic peptide"
AREDKTARNAMDY

SEQ ID NO: 3367 - protein, 445 aa, Artificial Sequence; identical to SEQ ID NO: 3267
  source: /note="Description of Artificial Sequence: Synthetic polypeptide"

SEQ ID NO: 3368 - protein, 107 aa, Artificial Sequence; identical to SEQ ID NO: 1056
  source: /note="Description of Artificial Sequence: Synthetic polypeptide"

SEQ ID NO: 3369 - protein, 6 aa, Artificial Sequence
  source: /note="Description of Artificial Sequence: Synthetic peptide"
ENIYDV

SEQ ID NO: 3370 - protein, 3 aa, Artificial Sequence
  source: /note="Description of Artificial Sequence: Synthetic peptide"
EAT

SEQ ID NO: 3371 - protein, 9 aa, Artificial Sequence
  source: /note="Description of Artificial Sequence: Synthetic peptide"
QHFWGTPYT

SEQ ID NO: 3372 - protein, 214 aa, Artificial Sequence; identical to SEQ ID NO: 3362
  source: /note="Description of Artificial Sequence: Synthetic polypeptide"

SEQ ID NO: 3373 - protein, 120 aa, Artificial Sequence; identical to SEQ ID NO: 1052
  source: /note="Description of Artificial Sequence: Synthetic polypeptide"

SEQ ID NO: 3374 - protein, 8 aa, Artificial Sequence
  source: /note="Description of Artificial Sequence: Synthetic peptide"
GYTFTDYN

SEQ ID NO: 3375 - protein, 8 aa, Artificial Sequence
  source: /note="Description of Artificial Sequence: Synthetic peptide"
IYPYIGGS

SEQ ID NO: 3376 - protein, 13 aa, Artificial Sequence
  source: /note="Description of Artificial Sequence: Synthetic peptide"
AREDKTARNAMDY

SEQ ID NO: 3377 - protein, 455 aa, Artificial Sequence; identical to SEQ ID NO: 3277
  source: /note="Description of Artificial Sequence: Synthetic polypeptide"

SEQ ID NO: 3378 - protein, 107 aa, Artificial Sequence; identical to SEQ ID NO: 1056
  source: /note="Description of Artificial Sequence: Synthetic polypeptide"

SEQ ID NO: 3379 - protein, 6 aa, Artificial Sequence
  source: /note="Description of Artificial Sequence: Synthetic peptide"
ENIYDV

SEQ ID NO: 3380 - protein, 3 aa, Artificial Sequence
  source: /note="Description of Artificial Sequence: Synthetic peptide"
EAT

SEQ ID NO: 3381 - protein, 9 aa, Artificial Sequence
  source: /note="Description of Artificial Sequence: Synthetic peptide"
QHFWGTPYT

SEQ ID NO: 3382 - protein, 207 aa, Artificial Sequence
  source: /note="Description of Artificial Sequence: Synthetic polypeptide"
DIQMTQSPSSLSASVGDRVTITCRVSENIYDVLAWYQQKPGKAPKLLIYEATNLAEGVPSRFSGSGSGTDFTLTISSLQPEDFATYYCQHFWGTPYTFGQGTKLEIKSSASTKGPSVFPLAPCSRSTSESTAALGCLVKDYFPEPVTVSWNSGALTSGVHTFPAVLQSSGLYSLSSVVTVPSSSLGTKTYTCNVDHKPSNTKVDKRV

SEQ ID NO: 3383 - protein, 120 aa, Artificial Sequence; identical to SEQ ID NO: 1052
  source: /note="Description of Artificial Sequence: Synthetic polypeptide"

SEQ ID NO: 3384 - protein, 8 aa, Artificial Sequence
  source: /note="Description of Artificial Sequence: Synthetic peptide"
GYTFTDYN

SEQ ID NO: 3385 - protein, 8 aa, Artificial Sequence
  source: /note="Description of Artificial Sequence: Synthetic peptide"
IYPYIGGS

SEQ ID NO: 3386 - protein, 13 aa, Artificial Sequence
  source: /note="Description of Artificial Sequence: Synthetic peptide"
AREDKTARNAMDY

SEQ ID NO: 3387 - protein, 455 aa, Artificial Sequence; identical to SEQ ID NO: 3287
  source: /note="Description of Artificial Sequence: Synthetic polypeptide"

SEQ ID NO: 3388 - protein, 107 aa, Artificial Sequence; identical to SEQ ID NO: 1056
  source: /note="Description of Artificial Sequence: Synthetic polypeptide"

SEQ ID NO: 3389 - protein, 6 aa, Artificial Sequence
  source: /note="Description of Artificial Sequence: Synthetic peptide"
ENIYDV

SEQ ID NO: 3390 - protein, 3 aa, Artificial Sequence
  source: /note="Description of Artificial Sequence: Synthetic peptide"
EAT

SEQ ID NO: 3391 - protein, 9 aa, Artificial Sequence
  source: /note="Description of Artificial Sequence: Synthetic peptide"
QHFWGTPYT

SEQ ID NO: 3392 - protein, 207 aa, Artificial Sequence; identical to SEQ ID NO: 3382
  source: /note="Description of Artificial Sequence: Synthetic polypeptide"

SEQ ID NO: 3393 - protein, 120 aa, Artificial Sequence; identical to SEQ ID NO: 1052
  source: /note="Description of Artificial Sequence: Synthetic polypeptide"

SEQ ID NO: 3394 - protein, 8 aa, Artificial Sequence
  source: /note="Description of Artificial Sequence: Synthetic peptide"
GYTFTDYN

SEQ ID NO: 3395 - protein, 8 aa, Artificial Sequence
  source: /note="Description of Artificial Sequence: Synthetic peptide"
IYPYIGGS

SEQ ID NO: 3396 - protein, 13 aa, Artificial Sequence
  source: /note="Description of Artificial Sequence: Synthetic peptide"
AREDKTARNAMDY

SEQ ID NO: 3397 - protein, 448 aa, Artificial Sequence; identical to SEQ ID NO: 3297
  source: /note="Description of Artificial Sequence: Synthetic polypeptide"

SEQ ID NO: 3398 - protein, 107 aa, Artificial Sequence; identical to SEQ ID NO: 1056
  source: /note="Description of Artificial Sequence: Synthetic polypeptide"

SEQ ID NO: 3399 - protein, 6 aa, Artificial Sequence
  source: /note="Description of Artificial Sequence: Synthetic peptide"
ENIYDV

SEQ ID NO: 3400 - protein, 3 aa, Artificial Sequence
  source: /note="Description of Artificial Sequence: Synthetic peptide"
EAT

SEQ ID NO: 3401 - protein, 9 aa, Artificial Sequence
  source: /note="Description of Artificial Sequence: Synthetic peptide"
QHFWGTPYT

SEQ ID NO: 3402 - protein, 214 aa, Artificial Sequence; identical to SEQ ID NO: 3362
  source: /note="Description of Artificial Sequence: Synthetic polypeptide"

SEQ ID NO: 3403 - protein, 120 aa, Artificial Sequence; identical to SEQ ID NO: 1052
  source: /note="Description of Artificial Sequence: Synthetic polypeptide"

SEQ ID NO: 3404 - protein, 8 aa, Artificial Sequence
  source: /note="Description of Artificial Sequence: Synthetic peptide"
GYTFTDYN

SEQ ID NO: 3405 - protein, 8 aa, Artificial Sequence
  source: /note="Description of Artificial Sequence: Synthetic peptide"
IYPYIGGS

SEQ ID NO: 3406 - protein, 13 aa, Artificial Sequence
  source: /note="Description of Artificial Sequence: Synthetic peptide"
AREDKTARNAMDY

SEQ ID NO: 3407 - protein, 448 aa, Artificial Sequence; identical to SEQ ID NO: 3307
  source: /note="Description of Artificial Sequence: Synthetic polypeptide"

SEQ ID NO: 3408 - protein, 107 aa, Artificial Sequence; identical to SEQ ID NO: 1056
  source: /note="Description of Artificial Sequence: Synthetic polypeptide"

SEQ ID NO: 3409 - protein, 6 aa, Artificial Sequence
  source: /note="Description of Artificial Sequence: Synthetic peptide"
ENIYDV

SEQ ID NO: 3410 - protein, 3 aa, Artificial Sequence
  source: /note="Description of Artificial Sequence: Synthetic peptide"
EAT

SEQ ID NO: 3411 - protein, 9 aa, Artificial Sequence
  source: /note="Description of Artificial Sequence: Synthetic peptide"
QHFWGTPYT

SEQ ID NO: 3412 - protein, 214 aa, Artificial Sequence; identical to SEQ ID NO: 3362
  source: /note="Description of Artificial Sequence: Synthetic polypeptide"

SEQ ID NO: 3413 - protein, 121 aa, Artificial Sequence; identical to SEQ ID NO: 1634
  source: /note="Description of Artificial Sequence: Synthetic polypeptide"

SEQ ID NO: 3414 - protein, 8 aa, Artificial Sequence
  source: /note="Description of Artificial Sequence: Synthetic peptide"
GFTFSSYA

SEQ ID NO: 3415 - protein, 8 aa, Artificial Sequence
  source: /note="Description of Artificial Sequence: Synthetic peptide"
ISYAGEVK

SEQ ID NO: 3416 - protein, 14 aa, Artificial Sequence
  source: /note="Description of Artificial Sequence: Synthetic peptide"
ARDPLPLHYYGMDV

SEQ ID NO: 3417 - protein, 473 aa, Artificial Sequence
  source: /note="Description of Artificial Sequence: Synthetic polypeptide"
QSALTQPRSASGNPGQRVTISCSGSSSNMGRRPVNWYQQIPGTAPKLLIYSQNQRPSGVPDRFSGSQSGTSASLTISGLQSEDEAEYFCAVWDDIGRVLQLGGGTQLAVLGGGGSGGGGSGGGGSEVQLVETGGGLIQPGRSLRLSCAASGFTFSSYAMHWVRQAPGKGLEWVAVISYAGEVKYYADSVKGRFTISRDNSKNTLYLQMNSLRAEDTAVYYCARDPLPLHYYGMDVWGQGTTVTVSSESKYGPPCPPCPAPPVAGPSVFLFPPKPKDTLMISRTPEVTCVVVDVKQEDPEVQFNWYVDGVEVHNAKTKPREEQFNSTYRVVSVLTVLHQDWLNGKEYKCKVSNKGLPSSIEKTISKAKGQPREPQVYTLPPSQEQMTKNQVKLTCLVKGFYPSDIAVEWESNGQPENNYKTTPPVLDSDGSFFLYSRLTVDKSRWQEGNVFSCSVMHEALHNHYTQKSLSLSPG

SEQ ID NO: 3418 - protein, 110 aa, Artificial Sequence; identical to SEQ ID NO: 1639
  source: /note="Description of Artificial Sequence: Synthetic polypeptide"

SEQ ID NO: 3419 - protein, 8 aa, Artificial Sequence
  source: /note="Description of Artificial Sequence: Synthetic peptide"
SSNMGRRP

SEQ ID NO: 3420 - protein, 3 aa, Artificial Sequence
  source: /note="Description of Artificial Sequence: Synthetic peptide"
SQN

SEQ ID NO: 3421 - protein, 11 aa, Artificial Sequence
  source: /note="Description of Artificial Sequence: Synthetic peptide"
AVWDDIGRVLQ

SEQ ID NO: 3422 - protein, 15 aa, Artificial Sequence
  source: /note="Description of Artificial Sequence: Synthetic peptide"
GGGGSGGGGSGGGGS

SEQ ID NO: 3423 - protein, 121 aa, Artificial Sequence; identical to SEQ ID NO: 1634
  source: /note="Description of Artificial Sequence: Synthetic polypeptide"

SEQ ID NO: 3424 - protein, 8 aa, Artificial Sequence
  source: /note="Description of Artificial Sequence: Synthetic peptide"
GFTFSSYA

SEQ ID NO: 3425 - protein, 8 aa, Artificial Sequence
  source: /note="Description of Artificial Sequence: Synthetic peptide"
ISYAGEVK

SEQ ID NO: 3426 - protein, 14 aa, Artificial Sequence
  source: /note="Description of Artificial Sequence: Synthetic peptide"
ARDPLPLHYYGMDV

SEQ ID NO: 3427 - protein, 473 aa, Artificial Sequence
  source: /note="Description of Artificial Sequence: Synthetic polypeptide"
EVQLVETGGGLIQPGRSLRLSCAASGFTFSSYAMHWVRQAPGKGLEWVAVISYAGEVKYYADSVKGRFTISRDNSKNTLYLQMNSLRAEDTAVYYCARDPLPLHYYGMDVWGQGTTVTVSSGGGGSGGGGSGGGGSQSALTQPRSASGNPGQRVTISCSGSSSNMGRRPVNWYQQIPGTAPKLLIYSQNQRPSGVPDRFSGSQSGTSASLTISGLQSEDEAEYFCAVWDDIGRVLQLGGGTQLAVLESKYGPPCPPCPAPPVAGPSVFLFPPKPKDTLMISRTPEVTCVVVDVKQEDPEVQFNWYVDGVEVHNAKTKPREEQFNSTYRVVSVLTVLHQDWLNGKEYKCKVSNKGLPSSIEKTISKAKGQPREPQVYTLPPSQEQMTKNQVKLTCLVKGFYPSDIAVEWESNGQPENNYKTTPPVLDSDGSFFLYSRLTVDKSRWQEGNVFSCSVMHEALHNHYTQKSLSLSPG

SEQ ID NO: 3428 - protein, 110 aa, Artificial Sequence; identical to SEQ ID NO: 1639
  source: /note="Description of Artificial Sequence: Synthetic polypeptide"

SEQ ID NO: 3429 - protein, 8 aa, Artificial Sequence
  source: /note="Description of Artificial Sequence: Synthetic peptide"
SSNMGRRP

SEQ ID NO: 3430 - protein, 3 aa, Artificial Sequence
  source: /note="Description of Artificial Sequence: Synthetic peptide"
SQN

SEQ ID NO: 3431 - protein, 11 aa, Artificial Sequence
  source: /note="Description of Artificial Sequence: Synthetic peptide"
AVWDDIGRVLQ

SEQ ID NO: 3432 - protein, 15 aa, Artificial Sequence
  source: /note="Description of Artificial Sequence: Synthetic peptide"
GGGGSGGGGSGGGGS

SEQ ID NO: 3433 - protein, 121 aa, Artificial Sequence; identical to SEQ ID NO: 1634
  source: /note="Description of Artificial Sequence: Synthetic polypeptide"

SEQ ID NO: 3434 - protein, 8 aa, Artificial Sequence
  source: /note="Description of Artificial Sequence: Synthetic peptide"
GFTFSSYA

SEQ ID NO: 3435 - protein, 8 aa, Artificial Sequence
  source: /note="Description of Artificial Sequence: Synthetic peptide"
ISYAGEVK

SEQ ID NO: 3436 - protein, 14 aa, Artificial Sequence
  source: /note="Description of Artificial Sequence: Synthetic peptide"
ARDPLPLHYYGMDV

SEQ ID NO: 3437 - protein, 473 aa, Artificial Sequence
  source: /note="Description of Artificial Sequence: Synthetic polypeptide"
QSALTQPRSASGNPGQRVTISCSGSSSNMGRRPVNWYQQIPGTAPKLLIYSQNQRPSGVPDRFSGSQSGTSASLTISGLQSEDEAEYFCAVWDDIGRVLQLGGGTQLAVLGGGGSGGGGSGGGGSEVQLVETGGGLIQPGRSLRLSCAASGFTFSSYAMHWVRQAPGKGLEWVAVISYAGEVKYYADSVKGRFTISRDNSKNTLYLQMNSLRAEDTAVYYCARDPLPLHYYGMDVWGQGTTVTVSSESKYGPPCPPCPAPPVAGPSVFLFPPKPKDTLMISRTPEVTCVVVDVKQEDPEVQFNWYVDGVEVHNAKTKPREEEFNSTYRVVSVLTVLHQDWLNGKEYKCKVSNKGLPSSIEKTISKAKGQPREPQVYTLPPSQEEMTKNQVSLTCDVSGFYPSDIAVEWESDGQPENNYKTTPPVLDSDGSFFLYSRLTVDKSRWEEGDVFSCSVMHEALHNHYTQKSLSLSPG

SEQ ID NO: 3438 - protein, 110 aa, Artificial Sequence; identical to SEQ ID NO: 1639
  source: /note="Description of Artificial Sequence: Synthetic polypeptide"

SEQ ID NO: 3439 - protein, 8 aa, Artificial Sequence
  source: /note="Description of Artificial Sequence: Synthetic peptide"
SSNMGRRP

SEQ ID NO: 3440 - protein, 3 aa, Artificial Sequence
  source: /note="Description of Artificial Sequence: Synthetic peptide"
SQN

SEQ ID NO: 3441 - protein, 11 aa, Artificial Sequence
  source: /note="Description of Artificial Sequence: Synthetic peptide"
AVWDDIGRVLQ

SEQ ID NO: 3442 - protein, 15 aa, Artificial Sequence
  source: /note="Description of Artificial Sequence: Synthetic peptide"
GGGGSGGGGSGGGGS

SEQ ID NO: 3443 - protein, 121 aa, Artificial Sequence; identical to SEQ ID NO: 1634
  source: /note="Description of Artificial Sequence: Synthetic polypeptide"

SEQ ID NO: 3444 - protein, 8 aa, Artificial Sequence
  source: /note="Description of Artificial Sequence: Synthetic peptide"
GFTFSSYA

SEQ ID NO: 3445 - protein, 8 aa, Artificial Sequence
  source: /note="Description of Artificial Sequence: Synthetic peptide"
ISYAGEVK

SEQ ID NO: 3446 - protein, 14 aa, Artificial Sequence
  source: /note="Description of Artificial Sequence: Synthetic peptide"
ARDPLPLHYYGMDV

SEQ ID NO: 3447 - protein, 473 aa, Artificial Sequence
  source: /note="Description of Artificial Sequence: Synthetic polypeptide"
EVQLVETGGGLIQPGRSLRLSCAASGFTFSSYAMHWVRQAPGKGLEWVAVISYAGEVKYYADSVKGRFTISRDNSKNTLYLQMNSLRAEDTAVYYCARDPLPLHYYGMDVWGQGTTVTVSSGGGGSGGGGSGGGGSQSALTQPRSASGNPGQRVTISCSGSSSNMGRRPVNWYQQIPGTAPKLLIYSQNQRPSGVPDRFSGSQSGTSASLTISGLQSEDEAEYFCAVWDDIGRVLQLGGGTQLAVLESKYGPPCPPCPAPPVAGPSVFLFPPKPKDTLMISRTPEVTCVVVDVKQEDPEVQFNWYVDGVEVHNAKTKPREEEFNSTYRVVSVLTVLHQDWLNGKEYKCKVSNKGLPSSIEKTISKAKGQPREPQVYTLPPSQEEMTKNQVSLTCDVSGFYPSDIAVEWESDGQPENNYKTTPPVLDSDGSFFLYSRLTVDKSRWEEGDVFSCSVMHEALHNHYTQKSLSLSPG

SEQ ID NO: 3448 - protein, 110 aa, Artificial Sequence; identical to SEQ ID NO: 1639
  source: /note="Description of Artificial Sequence: Synthetic polypeptide"

SEQ ID NO: 3449 - protein, 8 aa, Artificial Sequence
  source: /note="Description of Artificial Sequence: Synthetic peptide"
SSNMGRRP

SEQ ID NO: 3450 - protein, 3 aa, Artificial Sequence
  source: /note="Description of Artificial Sequence: Synthetic peptide"
SQN

SEQ ID NO: 3451 - protein, 11 aa, Artificial Sequence
  source: /note="Description of Artificial Sequence: Synthetic peptide"
AVWDDIGRVLQ

SEQ ID NO: 3452 - protein, 15 aa, Artificial Sequence
  source: /note="Description of Artificial Sequence: Synthetic peptide"
GGGGSGGGGSGGGGS

SEQ ID NO: 3453 - protein, 121 aa, Artificial Sequence; identical to SEQ ID NO: 1634
  source: /note="Description of Artificial Sequence: Synthetic polypeptide"

SEQ ID NO: 3454 - protein, 8 aa, Artificial Sequence
  source: /note="Description of Artificial Sequence: Synthetic peptide"
GFTFSSYA

SEQ ID NO: 3455 - protein, 8 aa, Artificial Sequence
  source: /note="Description of Artificial Sequence: Synthetic peptide"
ISYAGEVK

SEQ ID NO: 3456 - protein, 14 aa, Artificial Sequence
  source: /note="Description of Artificial Sequence: Synthetic peptide"
ARDPLPLHYYGMDV

SEQ ID NO: 3457 - protein, 446 aa, Artificial Sequence
  source: /note="Description of Artificial Sequence: Synthetic polypeptide"
EVQLVETGGGLIQPGRSLRLSCAASGFTFSSYAMHWVRQAPGKGLEWVAVISYAGEVKYYADSVKGRFTISRDNSKNTLYLQMNSLRAEDTAVYYCARDPLPLHYYGMDVWGQGTTVTVSSASTKGPSVFPLAPCSRSTSESTAALGCLVKDYFPEPVTVSWNSGALTSGVHTFPAVLQSSGLYSLSSVVTVPSSSLGTKTYTCNVDHKPSDTKVDKRVESKYGPPCPPCPAPPVAGPSVFLFPPKPKDTLMISRTPEVTCVVVDVKQEDPEVQFNWYVDGVEVHNAKTKPREEQFNSTYRVVSVLTVLHQDWLNGKEYKCKVSNKGLPSSIEKTISKAKGQPREPQVYTLPPSQEQMTKNQVKLTCLVKGFYPSDIAVEWESNGQPENNYKTTPPVLDSDGSFFLYSRLTVDKSRWQEGNVFSCSVMHEALHNHYTQKSLSLSPG

SEQ ID NO: 3458 - protein, 110 aa, Artificial Sequence; identical to SEQ ID NO: 1639
  source: /note="Description of Artificial Sequence: Synthetic polypeptide"

SEQ ID NO: 3459 - protein, 8 aa, Artificial Sequence
  source: /note="Description of Artificial Sequence: Synthetic peptide"
SSNMGRRP

SEQ ID NO: 3460 - protein, 3 aa, Artificial Sequence
  source: /note="Description of Artificial Sequence: Synthetic peptide"
SQN

SEQ ID NO: 3461 - protein, 11 aa, Artificial Sequence
  source: /note="Description of Artificial Sequence: Synthetic peptide"
AVWDDIGRVLQ

SEQ ID NO: 3462 - protein, 216 aa, Artificial Sequence; identical to SEQ ID NO: 1643
  source: /note="Description of Artificial Sequence: Synthetic polypeptide"

SEQ ID NO: 3463 - protein, 121 aa, Artificial Sequence; identical to SEQ ID NO: 1634
  source: /note="Description of Artificial Sequence: Synthetic polypeptide"

SEQ ID NO: 3464 - protein, 8 aa, Artificial Sequence
  source: /note="Description of Artificial Sequence: Synthetic peptide"
GFTFSSYA

SEQ ID NO: 3465 - protein, 8 aa, Artificial Sequence
  source: /note="Description of Artificial Sequence: Synthetic peptide"
ISYAGEVK

SEQ ID NO: 3466 - protein, 14 aa, Artificial Sequence
  source: /note="Description of Artificial Sequence: Synthetic peptide"
ARDPLPLHYYGMDV

SEQ ID NO: 3467 - protein, 446 aa, Artificial Sequence
  source: /note="Description of Artificial Sequence: Synthetic polypeptide"
EVQLVETGGGLIQPGRSLRLSCAASGFTFSSYAMHWVRQAPGKGLEWVAVISYAGEVKYYADSVKGRFTISRDNSKNTLYLQMNSLRAEDTAVYYCARDPLPLHYYGMDVWGQGTTVTVSSASTKGPSVFPLAPCSRSTSESTAALGCLVKDYFPEPVTVSWNSGALTSGVHTFPAVLQSSGLYSLSSVVTVPSSSLGTKTYTCNVDHKPSDTKVDKRVESKYGPPCPPCPAPPVAGPSVFLFPPKPKDTLMISRTPEVTCVVVDVKQEDPEVQFNWYVDGVEVHNAKTKPREEEFNSTYRVVSVLTVLHQDWLNGKEYKCKVSNKGLPSSIEKTISKAKGQPREPQVYTLPPSQEEMTKNQVSLTCDVSGFYPSDIAVEWESDGQPENNYKTTPPVLDSDGSFFLYSRLTVDKSRWEEGDVFSCSVMHEALHNHYTQKSLSLSPG

SEQ ID NO: 3468 - protein, 110 aa, Artificial Sequence; identical to SEQ ID NO: 1639
  source: /note="Description of Artificial Sequence: Synthetic polypeptide"

SEQ ID NO: 3469 - protein, 8 aa, Artificial Sequence
  source: /note="Description of Artificial Sequence: Synthetic peptide"
SSNMGRRP

SEQ ID NO: 3470 - protein, 3 aa, Artificial Sequence
  source: /note="Description of Artificial Sequence: Synthetic peptide"
SQN

SEQ ID NO: 3471 - protein, 11 aa, Artificial Sequence
  source: /note="Description of Artificial Sequence: Synthetic peptide"
AVWDDIGRVLQ

SEQ ID NO: 3472 - protein, 216 aa, Artificial Sequence; identical to SEQ ID NO: 1643
  source: /note="Description of Artificial Sequence: Synthetic polypeptide"

SEQ ID NO: 3473 - protein, 121 aa, Artificial Sequence; identical to SEQ ID NO: 1634
  source: /note="Description of Artificial Sequence: Synthetic polypeptide"

SEQ ID NO: 3474 - protein, 8 aa, Artificial Sequence
  source: /note="Description of Artificial Sequence: Synthetic peptide"
GFTFSSYA

SEQ ID NO: 3475 - protein, 8 aa, Artificial Sequence
  source: /note="Description of Artificial Sequence: Synthetic peptide"
ISYAGEVK

SEQ ID NO: 3476 - protein, 14 aa, Artificial Sequence
  source: /note="Description of Artificial Sequence: Synthetic peptide"
ARDPLPLHYYGMDV

SEQ ID NO: 3477 - protein, 457 aa, Artificial Sequence
  source: /note="Description of Artificial Sequence: Synthetic polypeptide"
EVQLVETGGGLIQPGRSLRLSCAASGFTFSSYAMHWVRQAPGKGLEWVAVISYAGEVKYYADSVKGRFTISRDNSKNTLYLQMNSLRAEDTAVYYCARDPLPLHYYGMDVWGQGTTVTVSSASGQPKAAPSVTLFPPSSEELQANKATLVCLISDFYPGAVTVAWKADSSPVKAGVETTTPSKQSNNKYAASSYLSLTPEQWKSHRSYSCQVTHEGSTVEKTVAPTECSESKYGPPCPPCPAPEFLGGPSVFLFPPKPKDTLMISRTPEVTCVVVDVSQEDPEVQFNWYVDGVEVHNAKTKPREEQFNSTYRVVSVLTVLHQDWLNGKEYKCKVSNKGLPSSIEKTISKAKGQPREPQVCTLPPSQDELTKNQVSLSCAVKGFYPSDIAVEWESNGQPENNYKTTPPVLDSDGSFFLVSRLTVDKSRWQEGNVFSCSVMHEALHNHYTQKSLSLSPG

SEQ ID NO: 3478 - protein, 110 aa, Artificial Sequence; identical to SEQ ID NO: 1639
  source: /note="Description of Artificial Sequence: Synthetic polypeptide"

SEQ ID NO: 3479 - protein, 8 aa, Artificial Sequence
  source: /note="Description of Artificial Sequence: Synthetic peptide"
SSNMGRRP

SEQ ID NO: 3480 - protein, 3 aa, Artificial Sequence
  source: /note="Description of Artificial Sequence: Synthetic peptide"
SQN

SEQ ID NO: 3481 - protein, 11 aa, Artificial Sequence
  source: /note="Description of Artificial Sequence: Synthetic peptide"
AVWDDIGRVLQ

SEQ ID NO: 3482 - protein, 215 aa, Artificial Sequence; identical to SEQ ID NO: 3178
  source: /note="Description of Artificial Sequence: Synthetic polypeptide"

SEQ ID NO: 3483 - protein, 121 aa, Artificial Sequence; identical to SEQ ID NO: 1634
  source: /note="Description of Artificial Sequence: Synthetic polypeptide"

SEQ ID NO: 3484 - protein, 8 aa, Artificial Sequence
  source: /note="Description of Artificial Sequence: Synthetic peptide"
GFTFSSYA

SEQ ID NO: 3485 - protein, 8 aa, Artificial Sequence
  source: /note="Description of Artificial Sequence: Synthetic peptide"
ISYAGEVK

SEQ ID NO: 3486 - protein, 14 aa, Artificial Sequence
  source: /note="Description of Artificial Sequence: Synthetic peptide"
ARDPLPLHYYGMDV

SEQ ID NO: 3487 - protein, 457 aa, Artificial Sequence
  source: /note="Description of Artificial Sequence: Synthetic polypeptide"
EVQLVETGGGLIQPGRSLRLSCAASGFTFSSYAMHWVRQAPGKGLEWVAVISYAGEVKYYADSVKGRFTISRDNSKNTLYLQMNSLRAEDTAVYYCARDPLPLHYYGMDVWGQGTTVTVSSASGQPKAAPSVTLFPPSSEELQANKATLVCLISDFYPGAVTVAWKADSSPVKAGVETTTPSKQSNNKYAASSYLSLTPEQWKSHRSYSCQVTHEGSTVEKTVAPTECSESKYGPPCPPCPAPEFLGGPSVFLFPPKPKDTLMISRTPEVTCVVVDVSQEDPEVQFNWYVDGVEVHNAKTKPREEQFNSTYRVVSVLTVLHQDWLNGKEYKCKVSNKGLPSSIEKTISKAKGQPREPQVYTLPPCQDELTKNQVSLWCLVKGFYPSDIAVEWESNGQPENNYKTTPPVLDSDGSFFLYSRLTVDKSRWQEGNVFSCSVMHEALHNHYTQKSLSLSPG

SEQ ID NO: 3488 - protein, 110 aa, Artificial Sequence; identical to SEQ ID NO: 1639
  source: /note="Description of Artificial Sequence: Synthetic polypeptide"

SEQ ID NO: 3489 - protein, 8 aa, Artificial Sequence
  source: /note="Description of Artificial Sequence: Synthetic peptide"
SSNMGRRP

SEQ ID NO: 3490 - protein, 3 aa, Artificial Sequence
  source: /note="Description of Artificial Sequence: Synthetic peptide"
SQN

SEQ ID NO: 3491 - protein, 11 aa, Artificial Sequence
  source: /note="Description of Artificial Sequence: Synthetic peptide"
AVWDDIGRVLQ

SEQ ID NO: 3492 - protein, 215 aa, Artificial Sequence; identical to SEQ ID NO: 3178
  source: /note="Description of Artificial Sequence: Synthetic polypeptide"

SEQ ID NO: 3493 - protein, 121 aa, Artificial Sequence; identical to SEQ ID NO: 1634
  source: /note="Description of Artificial Sequence: Synthetic polypeptide"

SEQ ID NO: 3494 - protein, 8 aa, Artificial Sequence
  source: /note="Description of Artificial Sequence: Synthetic peptide"
GFTFSSYA

SEQ ID NO: 3495 - protein, 8 aa, Artificial Sequence
  source: /note="Description of Artificial Sequence: Synthetic peptide"
ISYAGEVK

SEQ ID NO: 3496 - protein, 14 aa, Artificial Sequence
  source: /note="Description of Artificial Sequence: Synthetic peptide"
ARDPLPLHYYGMDV

SEQ ID NO: 3497 - protein, 449 aa, Artificial Sequence
  source: /note="Description of Artificial Sequence: Synthetic polypeptide"
EVQLVETGGGLIQPGRSLRLSCAASGFTFSSYAMHWVRQAPGKGLEWVAVISYAGEVKYYADSVKGRFTISRDNSKNTLYLQMNSLRAEDTAVYYCARDPLPLHYYGMDVWGQGTTVTVSSASASTKGPSVFPLAPCSRSTSESTAALGCLVKDYFPEPVTVSWNSGALTSGVHTFPAVLQSSGLYSLSSVVTVPSSSLGTKTYTCNVDHKPSNTKVDKRVESKYGPPCPPCPAPEFLGGPSVFLFPPKPKDTLMISRTPEVTCVVVDVSQEDPEVQFNWYVDGVEVHNAKTKPREEQFNSTYRVVSVLTVLHQDWLNGKEYKCKVSNKGLPSSIEKTISKAKGQPREPQVCTLPPSQDELTKNQVSLSCAVKGFYPSDIAVEWESNGQPENNYKTTPPVLDSDGSFFLVSRLTVDKSRWQEGNVFSCSVMHEALHNHYTQKSLSLSPG

SEQ ID NO: 3498 - protein, 110 aa, Artificial Sequence; identical to SEQ ID NO: 1639
  source: /note="Description of Artificial Sequence: Synthetic polypeptide"

SEQ ID NO: 3499 - protein, 8 aa, Artificial Sequence
  source: /note="Description of Artificial Sequence: Synthetic peptide"
SSNMGRRP

SEQ ID NO: 3500 - protein, 3 aa, Artificial Sequence
  source: /note="Description of Artificial Sequence: Synthetic peptide"
SQN

SEQ ID NO: 3501 - protein, 11 aa, Artificial Sequence
  source: /note="Description of Artificial Sequence: Synthetic peptide"
AVWDDIGRVLQ

SEQ ID NO: 3502 - protein, 216 aa, Artificial Sequence; identical to SEQ ID NO: 1643
  source: /note="Description of Artificial Sequence: Synthetic polypeptide"

SEQ ID NO: 3503 - protein, 121 aa, Artificial Sequence; identical to SEQ ID NO: 1634
  source: /note="Description of Artificial Sequence: Synthetic polypeptide"

SEQ ID NO: 3504 - protein, 8 aa, Artificial Sequence
  source: /note="Description of Artificial Sequence: Synthetic peptide"
GFTFSSYA

SEQ ID NO: 3505 - protein, 8 aa, Artificial Sequence
  source: /note="Description of Artificial Sequence: Synthetic peptide"
ISYAGEVK

SEQ ID NO: 3506 - protein, 14 aa, Artificial Sequence
  source: /note="Description of Artificial Sequence: Synthetic peptide"
ARDPLPLHYYGMDV

SEQ ID NO: 3507 - protein, 449 aa, Artificial Sequence
  source: /note="Description of Artificial Sequence: Synthetic polypeptide"
EVQLVETGGGLIQPGRSLRLSCAASGFTFSSYAMHWVRQAPGKGLEWVAVISYAGEVKYYADSVKGRFTISRDNSKNTLYLQMNSLRAEDTAVYYCARDPLPLHYYGMDVWGQGTTVTVSSASASTKGPSVFPLAPCSRSTSESTAALGCLVKDYFPEPVTVSWNSGALTSGVHTFPAVLQSSGLYSLSSVVTVPSSSLGTKTYTCNVDHKPSNTKVDKRVESKYGPPCPPCPAPEFLGGPSVFLFPPKPKDTLMISRTPEVTCVVVDVSQEDPEVQFNWYVDGVEVHNAKTKPREEQFNSTYRVVSVLTVLHQDWLNGKEYKCKVSNKGLPSSIEKTISKAKGQPREPQVYTLPPCQDELTKNQVSLWCLVKGFYPSDIAVEWESNGQPENNYKTTPPVLDSDGSFFLYSRLTVDKSRWQEGNVFSCSVMHEALHNHYTQKSLSLSPG

SEQ ID NO: 3508 - protein, 110 aa, Artificial Sequence; identical to SEQ ID NO: 1639
  source: /note="Description of Artificial Sequence: Synthetic polypeptide"

SEQ ID NO: 3509 - protein, 8 aa, Artificial Sequence
  source: /note="Description of Artificial Sequence: Synthetic peptide"
SSNMGRRP

SEQ ID NO: 3510 - protein, 3 aa, Artificial Sequence
  source: /note="Description of Artificial Sequence: Synthetic peptide"
SQN

SEQ ID NO: 3511 - protein, 11 aa, Artificial Sequence
  source: /note="Description of Artificial Sequence: Synthetic peptide"
AVWDDIGRVLQ

SEQ ID NO: 3512 - protein, 216 aa, Artificial Sequence; identical to SEQ ID NO: 1643
  source: /note="Description of Artificial Sequence: Synthetic polypeptide"

SEQ ID NO: 3513 - protein, 119 aa, Artificial Sequence; identical to SEQ ID NO: 1664
  source: /note="Description of Artificial Sequence: Synthetic polypeptide"

SEQ ID NO: 3514 - protein, 8 aa, Artificial Sequence
  source: /note="Description of Artificial Sequence: Synthetic peptide"
GFTFSSYI

SEQ ID NO: 3515 - protein, 8 aa, Artificial Sequence
  source: /note="Description of Artificial Sequence: Synthetic peptide"
ISGGSKGQ

SEQ ID NO: 3516 - protein, 12 aa, Artificial Sequence
  source: /note="Description of Artificial Sequence: Synthetic peptide"
AKWLLSYYAMDY

SEQ ID NO: 3517 - protein, 468 aa, Artificial Sequence
  source: /note="Description of Artificial Sequence: Synthetic polypeptide"
DIQMTQSPSSLSASVGDRITITCRASQSMAIWLSWYQQKPGKAPKLLIYKASKSHTGVPSRFSGSGSGTDFTLTISSLQPEDFATYYCQQGQSYPYTFGQGTKLEIKGGGGSGGGGSGGGGSEVQLVESGGGLVQPGGSLRLSCAASGFTFSSYIMSWVRQAPGKGLEWVATISGGSKGQYYADSVKGRFTISRDNSKNTLYLQMNSLRAEDTAVYYCAKWLLSYYAMDYWGQGTLVTVSSESKYGPPCPPCPAPPVAGPSVFLFPPKPKDTLMISRTPEVTCVVVDVKQEDPEVQFNWYVDGVEVHNAKTKPREEQFNSTYRVVSVLTVLHQDWLNGKEYKCKVSNKGLPSSIEKTISKAKGQPREPQVYTLPPSQEQMTKNQVKLTCLVKGFYPSDIAVEWESNGQPENNYKTTPPVLDSDGSFFLYSRLTVDKSRWQEGNVFSCSVMHEALHNHYTQKSLSLSPG

SEQ ID NO: 3518 - protein, 107 aa, Artificial Sequence; identical to SEQ ID NO: 1668
  source: /note="Description of Artificial Sequence: Synthetic polypeptide"

SEQ ID NO: 3519 - protein, 6 aa, Artificial Sequence
  source: /note="Description of Artificial Sequence: Synthetic peptide"
QSMAIW

SEQ ID NO: 3520 - protein, 3 aa, Artificial Sequence
  source: /note="Description of Artificial Sequence: Synthetic peptide"
KAS

SEQ ID NO: 3521 - protein, 9 aa, Artificial Sequence
  source: /note="Description of Artificial Sequence: Synthetic peptide"
QQGQSYPYT

SEQ ID NO: 3522 - protein, 15 aa, Artificial Sequence
  source: /note="Description of Artificial Sequence: Synthetic peptide"
GGGGSGGGGSGGGGS

SEQ ID NO: 3523 - protein, 119 aa, Artificial Sequence; identical to SEQ ID NO: 1664
  source: /note="Description of Artificial Sequence: Synthetic polypeptide"

SEQ ID NO: 3524 - protein, 8 aa, Artificial Sequence
  source: /note="Description of Artificial Sequence: Synthetic peptide"
GFTFSSYI

SEQ ID NO: 3525 - protein, 8 aa, Artificial Sequence
  source: /note="Description of Artificial Sequence: Synthetic peptide"
ISGGSKGQ

SEQ ID NO: 3526 - protein, 12 aa, Artificial Sequence
  source: /note="Description of Artificial Sequence: Synthetic peptide"
AKWLLSYYAMDY

SEQ ID NO: 3527 - protein, 468 aa, Artificial Sequence
  source: /note="Description of Artificial Sequence: Synthetic polypeptide"
EVQLVESGGGLVQPGGSLRLSCAASGFTFSSYIMSWVRQAPGKGLEWVATISGGSKGQYYADSVKGRFTISRDNSKNTLYLQMNSLRAEDTAVYYCAKWLLSYYAMDYWGQGTLVTVSSGGGGSGGGGSGGGGSDIQMTQSPSSLSASVGDRITITCRASQSMAIWLSWYQQKPGKAPKLLIYKASKSHTGVPSRFSGSGSGTDFTLTISSLQPEDFATYYCQQGQSYPYTFGQGTKLEIKESKYGPPCPPCPAPPVAGPSVFLFPPKPKDTLMISRTPEVTCVVVDVKQEDPEVQFNWYVDGVEVHNAKTKPREEQFNSTYRVVSVLTVLHQDWLNGKEYKCKVSNKGLPSSIEKTISKAKGQPREPQVYTLPPSQEQMTKNQVKLTCLVKGFYPSDIAVEWESNGQPENNYKTTPPVLDSDGSFFLYSRLTVDKSRWQEGNVFSCSVMHEALHNHYTQKSLSLSPG

SEQ ID NO: 3528 - protein, 107 aa, Artificial Sequence; identical to SEQ ID NO: 1668
  source: /note="Description of Artificial Sequence: Synthetic polypeptide"

SEQ ID NO: 3529 - protein, 6 aa, Artificial Sequence
  source: /note="Description of Artificial Sequence: Synthetic peptide"
QSMAIW

SEQ ID NO: 3530 - protein, 3 aa, Artificial Sequence
  source: /note="Description of Artificial Sequence: Synthetic peptide"
KAS

SEQ ID NO: 3531 - protein, 9 aa, Artificial Sequence
  source: /note="Description of Artificial Sequence: Synthetic peptide"
QQGQSYPYT

SEQ ID NO: 3532 - protein, 15 aa, Artificial Sequence
  source: /note="Description of Artificial Sequence: Synthetic peptide"
GGGGSGGGGSGGGGS

SEQ ID NO: 3533 - protein, 119 aa, Artificial Sequence; identical to SEQ ID NO: 1664
  source: /note="Description of Artificial Sequence: Synthetic polypeptide"

SEQ ID NO: 3534 - protein, 8 aa, Artificial Sequence
  source: /note="Description of Artificial Sequence: Synthetic peptide"
GFTFSSYI

SEQ ID NO: 3535 - protein, 8 aa, Artificial Sequence
  source: /note="Description of Artificial Sequence: Synthetic peptide"
ISGGSKGQ

SEQ ID NO: 3536 - protein, 12 aa, Artificial Sequence
  source: /note="Description of Artificial Sequence: Synthetic peptide"
AKWLLSYYAMDY

SEQ ID NO: 3537 - protein, 468 aa, Artificial Sequence
  source: /note="Description of Artificial Sequence: Synthetic polypeptide"
DIQMTQSPSSLSASVGDRITITCRASQSMAIWLSWYQQKPGKAPKLLIYKASKSHTGVPSRFSGSGSGTDFTLTISSLQPEDFATYYCQQGQSYPYTFGQGTKLEIKGGGGSGGGGSGGGGSEVQLVESGGGLVQPGGSLRLSCAASGFTFSSYIMSWVRQAPGKGLEWVATISGGSKGQYYADSVKGRFTISRDNSKNTLYLQMNSLRAEDTAVYYCAKWLLSYYAMDYWGQGTLVTVSSESKYGPPCPPCPAPPVAGPSVFLFPPKPKDTLMISRTPEVTCVVVDVKQEDPEVQFNWYVDGVEVHNAKTKPREEEFNSTYRVVSVLTVLHQDWLNGKEYKCKVSNKGLPSSIEKTISKAKGQPREPQVYTLPPSQEEMTKNQVSLTCDVSGFYPSDIAVEWESDGQPENNYKTTPPVLDSDGSFFLYSRLTVDKSRWEEGDVFSCSVMHEALHNHYTQKSLSLSPG

SEQ ID NO: 3538 - protein, 107 aa, Artificial Sequence; identical to SEQ ID NO: 1668
  source: /note="Description of Artificial Sequence: Synthetic polypeptide"

SEQ ID NO: 3539 - protein, 6 aa, Artificial Sequence
  source: /note="Description of Artificial Sequence: Synthetic peptide"
QSMAIW

SEQ ID NO: 3540 - protein, 3 aa, Artificial Sequence
  source: /note="Description of Artificial Sequence: Synthetic peptide"
KAS

SEQ ID NO: 3541 - protein, 9 aa, Artificial Sequence
  source: /note="Description of Artificial Sequence: Synthetic peptide"
QQGQSYPYT

SEQ ID NO: 3542 - protein, 15 aa, Artificial Sequence
  source: /note="Description of Artificial Sequence: Synthetic peptide"
GGGGSGGGGSGGGGS

SEQ ID NO: 3543 - protein, 119 aa, Artificial Sequence; identical to SEQ ID NO: 1664
  source: /note="Description of Artificial Sequence: Synthetic polypeptide"

SEQ ID NO: 3544 - protein, 8 aa, Artificial Sequence
  source: /note="Description of Artificial Sequence: Synthetic peptide"
GFTFSSYI

SEQ ID NO: 3545 - protein, 8 aa, Artificial Sequence
  source: /note="Description of Artificial Sequence: Synthetic peptide"
ISGGSKGQ

SEQ ID NO: 3546 - protein, 12 aa, Artificial Sequence
  source: /note="Description of Artificial Sequence: Synthetic peptide"
AKWLLSYYAMDY

SEQ ID NO: 3547 - protein, 468 aa, Artificial Sequence
  source: /note="Description of Artificial Sequence: Synthetic polypeptide"
EVQLVESGGGLVQPGGSLRLSCAASGFTFSSYIMSWVRQAPGKGLEWVATISGGSKGQYYADSVKGRFTISRDNSKNTLYLQMNSLRAEDTAVYYCAKWLLSYYAMDYWGQGTLVTVSSGGGGSGGGGSGGGGSDIQMTQSPSSLSASVGDRITITCRASQSMAIWLSWYQQKPGKAPKLLIYKASKSHTGVPSRFSGSGSGTDFTLTISSLQPEDFATYYCQQGQSYPYTFGQGTKLEIKESKYGPPCPPCPAPPVAGPSVFLFPPKPKDTLMISRTPEVTCVVVDVKQEDPEVQFNWYVDGVEVHNAKTKPREEEFNSTYRVVSVLTVLHQDWLNGKEYKCKVSNKGLPSSIEKTISKAKGQPREPQVYTLPPSQEEMTKNQVSLTCDVSGFYPSDIAVEWESDGQPENNYKTTPPVLDSDGSFFLYSRLTVDKSRWEEGDVFSCSVMHEALHNHYTQKSLSLSPG

SEQ ID NO: 3548 - protein, 107 aa, Artificial Sequence; identical to SEQ ID NO: 1668
  source: /note="Description of Artificial Sequence: Synthetic polypeptide"

SEQ ID NO: 3549 - protein, 6 aa, Artificial Sequence
  source: /note="Description of Artificial Sequence: Synthetic peptide"
QSMAIW

SEQ ID NO: 3550 - protein, 3 aa, Artificial Sequence
  source: /note="Description of Artificial Sequence: Synthetic peptide"
KAS

SEQ ID NO: 3551 - protein, 9 aa, Artificial Sequence
  source: /note="Description of Artificial Sequence: Synthetic peptide"
QQGQSYPYT

SEQ ID NO: 3552 - protein, 15 aa, Artificial Sequence
  source: /note="Description of Artificial Sequence: Synthetic peptide"
GGGGSGGGGSGGGGS

SEQ ID NO: 3553 - protein, 119 aa, Artificial Sequence; identical to SEQ ID NO: 1664
  source: /note="Description of Artificial Sequence: Synthetic polypeptide"

SEQ ID NO: 3554 - protein, 8 aa, Artificial Sequence
  source: /note="Description of Artificial Sequence: Synthetic peptide"
GFTFSSYI

SEQ ID NO: 3555 - protein, 8 aa, Artificial Sequence
  source: /note="Description of Artificial Sequence: Synthetic peptide"
ISGGSKGQ

SEQ ID NO: 3556 - protein, 12 aa, Artificial Sequence
  source: /note="Description of Artificial Sequence: Synthetic peptide"
AKWLLSYYAMDY

SEQ ID NO: 3557 - protein, 444 aa, Artificial Sequence
  source: /note="Description of Artificial Sequence: Synthetic polypeptide"
EVQLVESGGGLVQPGGSLRLSCAASGFTFSSYIMSWVRQAPGKGLEWVATISGGSKGQYYADSVKGRFTISRDNSKNTLYLQMNSLRAEDTAVYYCAKWLLSYYAMDYWGQGTLVTVSSASTKGPSVFPLAPCSRSTSESTAALGCLVKDYFPEPVTVSWNSGALTSGVHTFPAVLQSSGLYSLSSVVTVPSSSLGTKTYTCNVDHKPSNTKVDKRVESKYGPPCPPCPAPPVAGPSVFLFPPKPKDTLMISRTPEVTCVVVDVKQEDPEVQFNWYVDGVEVHNAKTKPREEQFNSTYRVVSVLTVLHQDWLNGKEYKCKVSNKGLPSSIEKTISKAKGQPREPQVYTLPPSQEQMTKNQVKLTCLVKGFYPSDIAVEWESNGQPENNYKTTPPVLDSDGSFFLYSRLTVDKSRWQEGNVFSCSVMHEALHNHYTQKSLSLSPG

SEQ ID NO: 3558 - protein, 107 aa, Artificial Sequence; identical to SEQ ID NO: 1668
  source: /note="Description of Artificial Sequence: Synthetic polypeptide"

SEQ ID NO: 3559 - protein, 6 aa, Artificial Sequence
  source: /note="Description of Artificial Sequence: Synthetic peptide"
QSMAIW

SEQ ID NO: 3560 - protein, 3 aa, Artificial Sequence
  source: /note="Description of Artificial Sequence: Synthetic peptide"
KAS

SEQ ID NO: 3561 - protein, 9 aa, Artificial Sequence
  source: /note="Description of Artificial Sequence: Synthetic peptide"
QQGQSYPYT

SEQ ID NO: 3562 - protein, 214 aa, Artificial Sequence
  source: /note="Description of Artificial Sequence: Synthetic polypeptide"
DIQMTQSPSSLSASVGDRITITCRASQSMAIWLSWYQQKPGKAPKLLIYKASKSHTGVPSRFSGSGSGTDFTLTISSLQPEDFATYYCQQGQSYPYTFGQGTKLEIKRTVAAPSVFIFPPSDEQLKSGTASVVCLLNNFYPREAKVQWKVDNALQSGNSQESVTEQDSKDSTYSLSSTLTLSKADYEKHKVYACEVTHQGLSSPVTKSFNRGEC

SEQ ID NO: 3563 - protein, 119 aa, Artificial Sequence; identical to SEQ ID NO: 1664
  source: /note="Description of Artificial Sequence: Synthetic polypeptide"

SEQ ID NO: 3564 - protein, 8 aa, Artificial Sequence
  source: /note="Description of Artificial Sequence: Synthetic peptide"
GFTFSSYI

SEQ ID NO: 3565 - protein, 8 aa, Artificial Sequence
  source: /note="Description of Artificial Sequence: Synthetic peptide"
ISGGSKGQ

SEQ ID NO: 3566 - protein, 12 aa, Artificial Sequence
  source: /note="Description of Artificial Sequence: Synthetic peptide"
AKWLLSYYAMDY

SEQ ID NO: 3567 - protein, 444 aa, Artificial Sequence
  source: /note="Description of Artificial Sequence: Synthetic polypeptide"
EVQLVESGGGLVQPGGSLRLSCAASGFTFSSYIMSWVRQAPGKGLEWVATISGGSKGQYYADSVKGRFTISRDNSKNTLYLQMNSLRAEDTAVYYCAKWLLSYYAMDYWGQGTLVTVSSASTKGPSVFPLAPCSRSTSESTAALGCLVKDYFPEPVTVSWNSGALTSGVHTFPAVLQSSGLYSLSSVVTVPSSSLGTKTYTCNVDHKPSDTKVDKRVESKYGPPCPPCPAPPVAGPSVFLFPPKPKDTLMISRTPEVTCVVVDVKQEDPEVQFNWYVDGVEVHNAKTKPREEEFNSTYRVVSVLTVLHQDWLNGKEYKCKVSNKGLPSSIEKTISKAKGQPREPQVYTLPPSQEEMTKNQVSLTCDVSGFYPSDIAVEWESDGQPENNYKTTPPVLDSDGSFFLYSRLTVDKSRWEEGDVFSCSVMHEALHNHYTQKSLSLSPG

SEQ ID NO: 3568 - protein, 107 aa, Artificial Sequence; identical to SEQ ID NO: 1668
  source: /note="Description of Artificial Sequence: Synthetic polypeptide"

SEQ ID NO: 3569 - protein, 6 aa, Artificial Sequence
  source: /note="Description of Artificial Sequence: Synthetic peptide"
QSMAIW

SEQ ID NO: 3570 - protein, 3 aa, Artificial Sequence
  source: /note="Description of Artificial Sequence: Synthetic peptide"
KAS

SEQ ID NO: 3571 - protein, 9 aa, Artificial Sequence
  source: /note="Description of Artificial Sequence: Synthetic peptide"
QQGQSYPYT

SEQ ID NO: 3572 - protein, 214 aa, Artificial Sequence; identical to SEQ ID NO: 3562
  source: /note="Description of Artificial Sequence: Synthetic polypeptide"

SEQ ID NO: 3573 - protein, 119 aa, Artificial Sequence; identical to SEQ ID NO: 1664
  source: /note="Description of Artificial Sequence: Synthetic polypeptide"

SEQ ID NO: 3574 - protein, 8 aa, Artificial Sequence
  source: /note="Description of Artificial Sequence: Synthetic peptide"
GFTFSSYI

SEQ ID NO: 3575 - protein, 8 aa, Artificial Sequence
  source: /note="Description of Artificial Sequence: Synthetic peptide"
ISGGSKGQ

SEQ ID NO: 3576 - protein, 12 aa, Artificial Sequence
  source: /note="Description of Artificial Sequence: Synthetic peptide"
AKWLLSYYAMDY

SEQ ID NO: 3577 - protein, 454 aa, Artificial Sequence
  source: /note="Description of Artificial Sequence: Synthetic polypeptide"
EVQLVESGGGLVQPGGSLRLSCAASGFTFSSYIMSWVRQAPGKGLEWVATISGGSKGQYYADSVKGRFTISRDNSKNTLYLQMNSLRAEDTAVYYCAKWLLSYYAMDYWGQGTLVTVSSASVAAPSVFIFPPSDEQLKSGTASVVCLLNNFYPREAKVQWKVDNALQSGNSQESVTEQDSKDSTYSLSSTLTLSKADYEKHKVYACEVTHQGLSSPVTKSFNRGECESKYGPPCPPCPAPEFLGGPSVFLFPPKPKDTLMISRTPEVTCVVVDVSQEDPEVQFNWYVDGVEVHNAKTKPREEQFNSTYRVVSVLTVLHQDWLNGKEYKCKVSNKGLPSSIEKTISKAKGQPREPQVCTLPPSQDELTKNQVSLSCAVKGFYPSDIAVEWESNGQPENNYKTTPPVLDSDGSFFLVSRLTVDKSRWQEGNVFSCSVMHEALHNHYTQKSLSLSPG

SEQ ID NO: 3578 - protein, 107 aa, Artificial Sequence; identical to SEQ ID NO: 1668
  source: /note="Description of Artificial Sequence: Synthetic polypeptide"

SEQ ID NO: 3579 - protein, 6 aa, Artificial Sequence
  source: /note="Description of Artificial Sequence: Synthetic peptide"
QSMAIW

SEQ ID NO: 3580 - protein, 3 aa, Artificial Sequence
  source: /note="Description of Artificial Sequence: Synthetic peptide"
KAS

SEQ ID NO: 3581 - protein, 9 aa, Artificial Sequence
  source: /note="Description of Artificial Sequence: Synthetic peptide"
QQGQSYPYT

SEQ ID NO: 3582 - protein, 207 aa, Artificial Sequence
  source: /note="Description of Artificial Sequence: Synthetic polypeptide"
DIQMTQSPSSLSASVGDRITITCRASQSMAIWLSWYQQKPGKAPKLLIYKASKSHTGVPSRFSGSGSGTDFTLTISSLQPEDFATYYCQQGQSYPYTFGQGTKLEIKSSASTKGPSVFPLAPCSRSTSESTAALGCLVKDYFPEPVTVSWNSGALTSGVHTFPAVLQSSGLYSLSSVVTVPSSSLGTKTYTCNVDHKPSNTKVDKRV

SEQ ID NO: 3583 - protein, 119 aa, Artificial Sequence; identical to SEQ ID NO: 1664
  source: /note="Description of Artificial Sequence: Synthetic polypeptide"

SEQ ID NO: 3584 - protein, 8 aa, Artificial Sequence
  source: /note="Description of Artificial Sequence: Synthetic peptide"
GFTFSSYI

SEQ ID NO: 3585 - protein, 8 aa, Artificial Sequence
  source: /note="Description of Artificial Sequence: Synthetic peptide"
ISGGSKGQ

SEQ ID NO: 3586 - protein, 12 aa, Artificial Sequence
  source: /note="Description of Artificial Sequence: Synthetic peptide"
AKWLLSYYAMDY

SEQ ID NO: 3587 - protein, 454 aa, Artificial Sequence
  source: /note="Description of Artificial Sequence: Synthetic polypeptide"
EVQLVESGGGLVQPGGSLRLSCAASGFTFSSYIMSWVRQAPGKGLEWVATISGGSKGQYYADSVKGRFTISRDNSKNTLYLQMNSLRAEDTAVYYCAKWLLSYYAMDYWGQGTLVTVSSASVAAPSVFIFPPSDEQLKSGTASVVCLLNNFYPREAKVQWKVDNALQSGNSQESVTEQDSKDSTYSLSSTLTLSKADYEKHKVYACEVTHQGLSSPVTKSFNRGECESKYGPPCPPCPAPEFLGGPSVFLFPPKPKDTLMISRTPEVTCVVVDVSQEDPEVQFNWYVDGVEVHNAKTKPREEQFNSTYRVVSVLTVLHQDWLNGKEYKCKVSNKGLPSSIEKTISKAKGQPREPQVYTLPPCQDELTKNQVSLWCLVKGFYPSDIAVEWESNGQPENNYKTTPPVLDSDGSFFLYSRLTVDKSRWQEGNVFSCSVMHEALHNHYTQKSLSLSPG

SEQ ID NO: 3588 - protein, 107 aa, Artificial Sequence; identical to SEQ ID NO: 1668
  source: /note="Description of Artificial Sequence: Synthetic polypeptide"

SEQ ID NO: 3589 - protein, 6 aa, Artificial Sequence
  source: /note="Description of Artificial Sequence: Synthetic peptide"
QSMAIW

SEQ ID NO: 3590 - protein, 3 aa, Artificial Sequence
  source: /note="Description of Artificial Sequence: Synthetic peptide"
KAS

SEQ ID NO: 3591 - protein, 9 aa, Artificial Sequence
  source: /note="Description of Artificial Sequence: Synthetic peptide"
QQGQSYPYT

SEQ ID NO: 3592 - protein, 205 aa, Artificial Sequence
  source: /note="Description of Artificial Sequence: Synthetic polypeptide"
DIQMTQSPSSLSASVGDRITITCRASQSMAIWLSWYQQKPGKAPKLLIYKASKSHTGVPSRFSGSGSGTDFTLTISSLQPEDFATYYCQQGQSYPYTFGQGTKLEIKASTKGPSVFPLAPCSRSTSESTAALGCLVKDYFPEPVTVSWNSGALTSGVHTFPAVLQSSGLYSLSSVVTVPSSSLGTKTYTCNVDHKPSNTKVDKRV

SEQ ID NO: 3593 - protein, 119 aa, Artificial Sequence; identical to SEQ ID NO: 1664
  source: /note="Description of Artificial Sequence: Synthetic polypeptide"

SEQ ID NO: 3594 - protein, 8 aa, Artificial Sequence
  source: /note="Description of Artificial Sequence: Synthetic peptide"
GFTFSSYI

SEQ ID NO: 3595 - protein, 8 aa, Artificial Sequence
  source: /note="Description of Artificial Sequence: Synthetic peptide"
ISGGSKGQ

SEQ ID NO: 3596 - protein, 12 aa, Artificial Sequence
  source: /note="Description of Artificial Sequence: Synthetic peptide"
AKWLLSYYAMDY

SEQ ID NO: 3597 - protein, 447 aa, Artificial Sequence
  source: /note="Description of Artificial Sequence: Synthetic polypeptide"
EVQLVESGGGLVQPGGSLRLSCAASGFTFSSYIMSWVRQAPGKGLEWVATISGGSKGQYYADSVKGRFTISRDNSKNTLYLQMNSLRAEDTAVYYCAKWLLSYYAMDYWGQGTLVTVSSASASTKGPSVFPLAPCSRSTSESTAALGCLVKDYFPEPVTVSWNSGALTSGVHTFPAVLQSSGLYSLSSVVTVPSSSLGTKTYTCNVDHKPSNTKVDKRVESKYGPPCPPCPAPEFLGGPSVFLFPPKPKDTLMISRTPEVTCVVVDVSQEDPEVQFNWYVDGVEVHNAKTKPREEQFNSTYRVVSVLTVLHQDWLNGKEYKCKVSNKGLPSSIEKTISKAKGQPREPQVCTLPPSQDELTKNQVSLSCAVKGFYPSDIAVEWESNGQPENNYKTTPPVLDSDGSFFLVSRLTVDKSRWQEGNVFSCSVMHEALHNHYTQKSLSLSPG

SEQ ID NO: 3598 - protein, 107 aa, Artificial Sequence; identical to SEQ ID NO: 1668
  source: /note="Description of Artificial Sequence: Synthetic polypeptide"

SEQ ID NO: 3599 - protein, 6 aa, Artificial Sequence
  source: /note="Description of Artificial Sequence: Synthetic peptide"
QSMAIW

SEQ ID NO: 3600 - protein, 3 aa, Artificial Sequence
  source: /note="Description of Artificial Sequence: Synthetic peptide"
KAS

SEQ ID NO: 3601 - protein, 9 aa, Artificial Sequence
  source: /note="Description of Artificial Sequence: Synthetic peptide"
QQGQSYPYT

SEQ ID NO: 3602 - protein, 214 aa, Artificial Sequence; identical to SEQ ID NO: 3562
  source: /note="Description of Artificial Sequence: Synthetic polypeptide"

SEQ ID NO: 3603 - protein, 119 aa, Artificial Sequence; identical to SEQ ID NO: 1664
  source: /note="Description of Artificial Sequence: Synthetic polypeptide"

SEQ ID NO: 3604 - protein, 8 aa, Artificial Sequence
  source: /note="Description of Artificial Sequence: Synthetic peptide"
GFTFSSYI

SEQ ID NO: 3605 - protein, 8 aa, Artificial Sequence
  source: /note="Description of Artificial Sequence: Synthetic peptide"
ISGGSKGQ

SEQ ID NO: 3606 - protein, 12 aa, Artificial Sequence
  source: /note="Description of Artificial Sequence: Synthetic peptide"
AKWLLSYYAMDY

SEQ ID NO: 3607 - protein, 447 aa, Artificial Sequence
  source: /note="Description of Artificial Sequence: Synthetic polypeptide"
EVQLVESGGGLVQPGGSLRLSCAASGFTFSSYIMSWVRQAPGKGLEWVATISGGSKGQYYADSVKGRFTISRDNSKNTLYLQMNSLRAEDTAVYYCAKWLLSYYAMDYWGQGTLVTVSSASASTKGPSVFPLAPCSRSTSESTAALGCLVKDYFPEPVTVSWNSGALTSGVHTFPAVLQSSGLYSLSSVVTVPSSSLGTKTYTCNVDHKPSNTKVDKRVESKYGPPCPPCPAPEFLGGPSVFLFPPKPKDTLMISRTPEVTCVVVDVSQEDPEVQFNWYVDGVEVHNAKTKPREEQFNSTYRVVSVLTVLHQDWLNGKEYKCKVSNKGLPSSIEKTISKAKGQPREPQVYTLPPCQDELTKNQVSLWCLVKGFYPSDIAVEWESNGQPENNYKTTPPVLDSDGSFFLYSRLTVDKSRWQEGNVFSCSVMHEALHNHYTQKSLSLSPG

SEQ ID NO: 3608 - protein, 107 aa, Artificial Sequence; identical to SEQ ID NO: 1668
  source: /note="Description of Artificial Sequence: Synthetic polypeptide"

SEQ ID NO: 3609 - protein, 6 aa, Artificial Sequence
  source: /note="Description of Artificial Sequence: Synthetic peptide"
QSMAIW

SEQ ID NO: 3610 - protein, 3 aa, Artificial Sequence
  source: /note="Description of Artificial Sequence: Synthetic peptide"
KAS

SEQ ID NO: 3611 - protein, 9 aa, Artificial Sequence
  source: /note="Description of Artificial Sequence: Synthetic peptide"
QQGQSYPYT

SEQ ID NO: 3612 - protein, 214 aa, Artificial Sequence; identical to SEQ ID NO: 3562
  source: /note="Description of Artificial Sequence: Synthetic polypeptide"

SEQ ID NO: 3613 - protein, 15 aa, Artificial Sequence
  source: /note="Description of Artificial Sequence: Synthetic peptide"
GGGGSGGGGSGGGGS

SEQ ID NO: 3614 - protein, 18 aa, Artificial Sequence
  source: /note="Description of Artificial Sequence: Synthetic peptide"
GSTSGSGKPGSGEGSTKG

SEQ ID NO: 3615 - protein, 14 aa, Artificial Sequence
  source: /note="Description of Artificial Sequence: Synthetic peptide"
IRPRAIGGSKPRVA

SEQ ID NO: 3616 - protein, 15 aa, Artificial Sequence
  source: /note="Description of Artificial Sequence: Synthetic peptide"
GKGGSGKGGSGKGGS

SEQ ID NO: 3617 - protein, 15 aa, Artificial Sequence
  source: /note="Description of Artificial Sequence: Synthetic peptide"
GGKGSGGKGSGGKGS

SEQ ID NO: 3618 - protein, 15 aa, Artificial Sequence
  source: /note="Description of Artificial Sequence: Synthetic peptide"
GGGKSGGGKSGGGKS

SEQ ID NO: 3619 - protein, 15 aa, Artificial Sequence
  source: /note="Description of Artificial Sequence: Synthetic peptide"
GKGKSGKGKSGKGKS

SEQ ID NO: 3620 - protein, 15 aa, Artificial Sequence
  source: /note="Description of Artificial Sequence: Synthetic peptide"
GGGKSGGKGSGKGGS

SEQ ID NO: 3621 - protein, 15 aa, Artificial Sequence
  source: /note="Description of Artificial Sequence: Synthetic peptide"
GKPGSGKPGSGKPGS

SEQ ID NO: 3622 - protein, 20 aa, Artificial Sequence
  source: /note="Description of Artificial Sequence: Synthetic peptide"
GKPGSGKPGSGKPGSGKPGS

SEQ ID NO: 3623 - protein, 20 aa, Artificial Sequence
  source: /note="Description of Artificial Sequence: Synthetic peptide"
GKGKSGKGKSGKGKSGKGKS

SEQ ID NO: 3624 - protein, 20 aa, Artificial Sequence
  source: /note="Description of Artificial Sequence: Synthetic peptide"
GGGGSGGGGSGGGGSGGGGS

SEQ ID NO: 3625 - protein, 15 aa, Artificial Sequence
  source: /note="Description of Artificial Sequence: Synthetic peptide"
STAGEITHLGGEDFD

SEQ ID NO: 3626 - protein, 15 aa, Artificial Sequence
  source: /note="Description of Artificial Sequence: Synthetic peptide"
GEGGSGEGGSGEGGS

SEQ ID NO: 3627 - protein, 15 aa, Artificial Sequence
  source: /note="Description of Artificial Sequence: Synthetic peptide"
GGEGSGGEGSGGEGS

SEQ ID NO: 3628 - protein, 15 aa, Artificial Sequence
  source: /note="Description of Artificial Sequence: Synthetic peptide"
GGGESGGGESGGGES

SEQ ID NO: 3629 - protein, 15 aa, Artificial Sequence
  source: /note="Description of Artificial Sequence: Synthetic peptide"
GEGESGEGESGEGFS

SEQ ID NO: 3630 - protein, 15 aa, Artificial Sequence
  source: /note="Description of Artificial Sequence: Synthetic peptide"
GGGESGGEGSGEGGS

SEQ ID NO: 3631 - protein, 20 aa, Artificial Sequence
  source: /note="Description of Artificial Sequence: Synthetic peptide"
GEGESGEGESGEGESGEGES

SEQ ID NO: 3632 - protein, 15 aa, Artificial Sequence
  source: /note="Description of Artificial Sequence: Synthetic peptide"
GGGGSGGGGSGGGGS

SEQ ID NO: 3633 - protein, 18 aa, Artificial Sequence
  source: /note="Description of Artificial Sequence: Synthetic peptide"
GSTSGSGKPGSGEGSTKG

SEQ ID NO: 3634 - protein, 14 aa, Artificial Sequence
  source: /note="Description of Artificial Sequence: Synthetic peptide"
IRPRAIGGSKPRVA

SEQ ID NO: 3635 - protein, 15 aa, Artificial Sequence
  source: /note="Description of Artificial Sequence: Synthetic peptide"
GKGGSGKGGSGKGGS

SEQ ID NO: 3636 - protein, 15 aa, Artificial Sequence
  source: /note="Description of Artificial Sequence: Synthetic peptide"
GGKGSGGKGSGGKGS

SEQ ID NO: 3637 - protein, 15 aa, Artificial Sequence
  source: /note="Description of Artificial Sequence: Synthetic peptide"
GGGKSGGGKSGGGKS

SEQ ID NO: 3638 - protein, 15 aa, Artificial Sequence
  source: /note="Description of Artificial Sequence: Synthetic peptide"
GKGKSGKGKSGKGKS

SEQ ID NO: 3639 - protein, 15 aa, Artificial Sequence
  source: /note="Description of Artificial Sequence: Synthetic peptide"
GGGKSGGKGSGKGGS

SEQ ID NO: 3640 - protein, 15 aa, Artificial Sequence
  source: /note="Description of Artificial Sequence: Synthetic peptide"
GKPGSGKPGSGKPGS

SEQ ID NO: 3641 - protein, 20 aa, Artificial Sequence
  source: /note="Description of Artificial Sequence: Synthetic peptide"
GKPGSGKPGSGKPGSGKPGS

SEQ ID NO: 3642 - protein, 20 aa, Artificial Sequence
  source: /note="Description of Artificial Sequence: Synthetic peptide"
GKGKSGKGKSGKGKSGKGKS

SEQ ID NO: 3643 - protein, 20 aa, Artificial Sequence
  source: /note="Description of Artificial Sequence: Synthetic peptide"
GGGGSGGGGSGGGGSGGGGS

SEQ ID NO: 3644 - protein, 15 aa, Artificial Sequence
  source: /note="Description of Artificial Sequence: Synthetic peptide"
STAGEITHLGGEDFD

SEQ ID NO: 3645 - protein, 15 aa, Artificial Sequence
  source: /note="Description of Artificial Sequence: Synthetic peptide"
GEGGSGEGGSGEGGS

SEQ ID NO: 3646 - protein, 15 aa, Artificial Sequence
  source: /note="Description of Artificial Sequence: Synthetic peptide"
GGEGSGGEGSGGEGS

SEQ ID NO: 3647 - protein, 15 aa, Artificial Sequence
  source: /note="Description of Artificial Sequence: Synthetic peptide"
GGGESGGGESGGGES

SEQ ID NO: 3648 - protein, 15 aa, Artificial Sequence
  source: /note="Description of Artificial Sequence: Synthetic peptide"
GEGESGEGESGEGFS

SEQ ID NO: 3649 - protein, 15 aa, Artificial Sequence
  source: /note="Description of Artificial Sequence: Synthetic peptide"
GGGESGGEGSGEGGS

SEQ ID NO: 3650 - protein, 20 aa, Artificial Sequence
  source: /note="Description of Artificial Sequence: Synthetic peptide"
GEGESGEGESGEGESGEGES

SEQ ID NO: 3651 - protein, 455 aa, Artificial Sequence; identical to SEQ ID NO: 3277
  CHA.7.518.4 VH Clambda- VL-CH1 Crossmab hIgG4 Fc Y349C E356D L358L T366S L368A Y407V Hole

SEQ ID NO: 3652 - protein, 455 aa, Artificial Sequence; identical to SEQ ID NO: 3287
  CHA.7.518.4 VH Clambda- VL-CH1 Crossmab hIgG4 Fc Y354C E356D M348L T366W Knob

SEQ ID NO: 3653 - protein, 454 aa, Artificial Sequence; identical to SEQ ID NO: 3577
  CHA.9.547.18 VH Clambda- VL-CH1 Crossmab hIgG4 Fc Y349C E356D L358L T366S L368A Y407V Hole

SEQ ID NO: 3654 - protein, 454 aa, Artificial Sequence; identical to SEQ ID NO: 3587
  CHA.9.547.18 VH Clambda- VL-CH1 Crossmab hIgG4 Fc Y354C E356D M348L T366W Knob

SEQ ID NO: 3655 - protein, 455 aa, Artificial Sequence; identical to SEQ ID NO: 3277
  CHA.7.518.1 VH Clambda- VL-CH1 Crossmab hIgG4 Fc Y349C E356D L358L T366S L368A Y407V Hole

SEQ ID NO: 3656 - protein, 454 aa, Artificial Sequence; identical to SEQ ID NO: 3587
  CHA.9.547.18 VH Clambda- VL-CH1 Crossmab hIgG4 Fc Y354C E356D M348L T366W Knob

SEQ ID NO: 3657 - protein, 455 aa, Artificial Sequence; identical to SEQ ID NO: 3287
  CHA.7.518.1 VH Clambda- VL-CH1 Crossmab hIgG4 Fc Y354C E356D M348L T366W Knob

SEQ ID NO: 3658 - protein, 454 aa, Artificial Sequence; identical to SEQ ID NO: 3577
  CHA.9.547.18 VH Clambda- VL-CH1 Crossmab hIgG4 Fc Y349C E356D L358L T366S L368A Y407V Hole

SEQ ID NO: 3659 - protein, 454 aa, Artificial Sequence; identical to SEQ ID NO: 3587
  CHA.9.547.18 VH Clambda- VL-CH1 Crossmab hIgG4 Fc Y354C E356D M348L T366W Knob

SEQ ID NO: 3660 - protein, 454 aa, Artificial Sequence; identical to SEQ ID NO: 3577
  CHA.9.547.18 VH Clambda- VL-CH1 Crossmab hIgG4 Fc Y349C E356D L358L T366S L368A Y407V Hole

SEQ ID NO: 3661 - protein, 455 aa, Artificial Sequence; identical to SEQ ID NO: 3277
  CHA.7.518.4 VH Clambda- VL-CH1 Crossmab hIgG4 Fc Y349C E356D L358L T366S L368A Y407V Hole

SEQ ID NO: 3662 - protein, 454 aa, Artificial Sequence; identical to SEQ ID NO: 3587
  CHA.9.547.18 VH Clambda- VL-CH1 Crossmab hIgG4 Fc Y354C E356D M348L T366W Knob

SEQ ID NO: 3663 - protein, 455 aa, Artificial Sequence; identical to SEQ ID NO: 3287
  CHA.7.518.4 VH Clambda- VL-CH1 Crossmab hIgG4 Fc Y354C E356D M348L T366W Knob

SEQ ID NO: 3664 - protein, 454 aa, Artificial Sequence; identical to SEQ ID NO: 3577
  CHA.9.547.18 VH Clambda- VL-CH1 Crossmab hIgG4 Fc Y349C E356D L358L T366S L368A Y407V Hole

SEQ ID NO: 3665 - protein, 454 aa, Artificial Sequence; identical to SEQ ID NO: 3587
  CHA.9.547.18 VH Clambda- VL-CH1 Crossmab hIgG4 Fc Y354C E356D M348L T366W Knob

SEQ ID NO: 3666 - protein, 454 aa, Artificial Sequence; identical to SEQ ID NO: 3577
  CHA.9.547.18 VH Clambda- VL-CH1 Crossmab hIgG4 Fc Y349C E356D L358L T366S L368A Y407V Hole
